(19) United States
(12) Patent Application Publication
(10) Pub. No.: US 2026/0055404 A1
(43) Pub. Date: Feb. 26, 2026

(54) EXTRACELLULAR VESICLE COMPRISING A BIOLOGICALLY ACTIVE MOLECULE AND A CELL PENETRATING PEPTIDE CLEAVABLE LINKER

(71) Applicant: LONZA SALES AG, Basel (CH)

(72) Inventors: Aaron NOYES, Basel (CH); Yaozhong ZHANG, Basel (CH)

(21) Appl. No.: 19/103,902

(22) PCT Filed: Aug. 15, 2023
(86) PCT No.: PCT/US2023/072243

§ 371 Date: Feb. 14, 2025

Related U.S. Application Data
(60) Provisional application No. 63/371,711, filed on Aug. 17, 2022.

(51) Int. Cl. C12N 15/113; A61K 47/54; A61K 47/65; A61K 47/69

(52) U.S. Cl. CPC C12N 15/113; A61K 47/544; A61K 47/554; A61K 47/65; A61K 47/6901

(57) ABSTRACT

The present disclosure relates to extracellular vesicles (e.g., exosomes) comprising a biologically active molecule covalently linked to the extracellular vesicle via a cleavable linker comprising a cell penetrating peptide and an anchoring moiety. The extracellular vesicles can be useful as an agent for the prophylaxis or treatment of cancer or other diseases. Also provided herein are methods for producing the extracellular vesicles and methods for using the extracellular vesicles to treat diseases or disorders.

### REFERENCE TO SEQUENCE LISTING SUBMITTED ELECTRONICALLY VIA EFS-WEB

[0001] The content of the electronically submitted sequence listing (Name: 0132-0311WO1_Seqlisting_ST26.xml, Size: 1,523,889 bytes; and Date of Creation: Aug. 16, 2022) submitted in this application is incorporated herein by reference in its entirety.

### TECHNICAL FIELD

[0002] The present disclosure provides extracellular vesicles (EVs), e.g., exosomes, which can be useful as an agent for the prophylaxis or treatment of cancer and other diseases comprising at least one biologically active molecule linked to the extracellular vesicle, e.g., exosome, via a cleavable linker and an anchoring moiety.

### BACKGROUND

[0003] Many bioactive compounds have potent biological activity that is of therapeutic interest. However, these compounds often exhibit toxicity in non-target organs. One way to limit exposure of non-target tissues is to chemically conjugate small molecules to affinity-based reagents such as antibodies, which can direct the therapeutic compound to specific cell types (Dosio, F. et al., Toxins (Basel) 3 (7): 848-883 (2011)), but this approach is limited by the number of molecules of the compound of interest that can be attached to an antibody (typically 2-6 molecules per antibody), and by the availability/existence of antibodies that specifically bind to targeted, relevant diseased/effector cells without binding to non-target cells. These two issues limit the use of antibody-drug conjugates (ADC) by decreasing potency and increasing systemic toxicity, respectively. Accordingly, there is a need for delivery systems with a higher payload than ADCs that can selectively target specific tissues or organs while at the same time limiting overall systemic exposure to the therapeutic compound.

[0004] EVs, e.g., exosomes, are important mediators of intercellular communication. They are also important biomarkers in the diagnosis and prognosis of many diseases, such as cancer. As drug delivery vehicles, EVs, e.g., exosomes, offer many advantages over traditional drug delivery methods (e.g., peptide immunization, DNA vaccines) as a new treatment modality in many therapeutic areas. However, despite its advantages, many EVs, e.g., exosomes, have had limited clinical efficacy. For example, dendritic-cell derived exosomes (DEX) were investigated in a Phase II clinical trial as maintenance immunotherapy after first line chemotherapy in patients with inoperable non-small cell lung cancer (NSCLC). However, the trial was terminated because the primary endpoint (at least 50% of patients with progression-free survival (PFS) at 4 months after chemotherapy cessation) was not reached. Besse, B., et al., Oncoimmunology 5 (4): e1071008 (2015).

[0005] Accordingly, new and more effective engineered-EVs, e.g., exosomes, are necessary to better enable therapeutic use and other applications of EV-based technologies.

### BRIEF SUMMARY

[0006] The present disclosure provides an extracellular vesicle (EV) comprising a biologically active molecule (BAM) attached to the EV via an anchoring moiety (AM) according to Formula I or II:

$$AM - {SP}_{1} - {L}_{1} - {SP}_{2} - {L}_{2} - {SP}_{3} - BAM - {SP}_{4} - {L}_{3} \qquad ( Formula I )$$

$$AM - {SP}_{1} - {L}_{1} - {SP}_{2} - {L}_{2} - {SP}_{3} - BAM \qquad ( Formula II )$$

wherein
[0007] L₁, L₂, and L₃ are the same or different and each is an optional cleavable linkage; and
[0008] SP₁, SP₂, SP₃, and SP₄ are optional first, second, third, and fourth spacers, respectively, and
   wherein at least one of L₁, L₂, and L₃ is present and comprises a cell penetrating peptide.

[0009] In some aspects, AM is covalently linked to BAM at the 5′ position. In some aspects, AM is covalently linked to BAM at the 3′ position.

[0010] In some aspects, the cell penetrating peptide comprises three or more argininyl moieties. In some aspects, the cell penetrating peptide comprises three, six, or nine argininyl moieties. In some aspects, the cell penetrating peptide further comprises at least one amino acid other than argininyl, such as cysteinyl, glycinyl, or a combination thereof. In some aspects, the cell penetrating peptide comprises a cyclic peptide, TAT, or Antp (antennapedia).

[0011] In some aspects, L₁ is present in Formula I or II and comprises the cell penetrating peptide. In some aspects, L₂ is present in Formula I or II and comprises the cell penetrating peptide. In some aspects, L₃ is present in Formula I and comprises the cell penetrating peptide.

[0012] In some aspects, at least one cleavable linkage of L₁, L₂, and L₃ that does not comprise the cell penetrating peptide is present and is a cleavable linkage comprising a phosphodiester bond, a disulfido, a polypeptidyl, a polynucleotidyl, a pyrophosphato, or a silyl ether or a combination thereof.

[0013] In some aspects, the at least one cleavable linkage that does not comprise the cell penetrating peptide is a cleavable linkage comprising a phosphodiester.

[0014] In some aspects, the at least one cleavable linkage that does not comprise the cell penetrating peptide is a cleavable linkage comprising a disulfido.

[0015] In some aspects, the at least one cleavable linkage that does not comprise the cell penetrating peptide is a cleavable linkage comprising a polypeptidyl. In some aspects, the polypeptidyl is selected from alanine-alanine-asparagine, valine-glycine, glycine-glycine, glutamic acid-valine-citrulline, aspartic acid-valine-citrulline, serine-valine-citrulline, lysine-valine-citrulline, glycine-glycine-glycine-valine-citrulline, cyclobutane-1,1-dicarboxamide-citrulline, and alanine-phenylalanine-lysine.

[0016] In some aspects, the at least one cleavable linkage that does not comprise the cell penetrating peptide is a cleavable linkage comprising a polynucleotidyl. In some aspects, the polynucleotidyl is a trinucleotidyl or higher. In some aspects, the polynucleotidyl is a tetranucleotidyl comprising dTdTdTdT, wherein dT is deoxythymidine.

[0017] In some aspects, the at least one cleavable linkage that does not comprise the cell penetrating peptide is a cleavable linkage comprising a pyrophosphato.

[0018] In some aspects, the at least one cleavable linkage that does not comprise the cell penetrating peptide is a cleavable linkage comprising a silyl ether. In some aspects, the silyl ether comprises-OSiR R²O—, wherein R¹ and R² are the same or different and each is C1-8 alkyl or aryl. In some aspects, the silyl ether comprises-OSiR ′R²O—, wherein R¹ and R² are both isopropyl.

[0019] In some aspects, the AM comprises a sterol, a lipid, a vitamin, a peptide, or a combination thereof.

[0020] In some aspects, the AM comprises a sterol comprising cholesterol, thiocholesterol, ergosterol, 7-dehydrocholesterol, 24S-hydroxycholesterol, lanosterol, cycloartenol, fucosterol, saringosterol, campesterol, β-sitosterol, sitostanol, coprostanol, avenasterol, stigmasterol, or combinations thereof. In some aspects, the sterol is cholesterol.

[0021] In some aspects, the AM comprises a lipid comprising a fatty acid or a phospholipid. In some aspects, the fatty acid is a straight chain fatty acid, a branched fatty acid, a saturated fatty acid, an unsaturated fatty acid, a hydroxyl fatty acid, a polycarboxylic acid, or any combination thereof. In some aspects, the straight chain fatty acid is butyric acid, caproic acid, caprylic acid, capric acid, lauric acid, myristic acid, palmitic acid, or stearic acid. In some aspects, the straight chain fatty acid is palmitic acid. In some aspects, the phospholipid comprises 16:0 1,2-dipalmitoyl-sn-glycero-3-phosphoethanolamine-N-[3-(2-pyridyldithio) propionate] (16:0 PDP PE), 16:0 1,2-dipalmitoyl-sn-glycero-3-phosphoethanolamine-N-[4-(p-maleimidomethyl)cyclohexane-carboxamide] (16:0 PE MCC), or 16:0 1,2-dipalmitoyl-sn-glycero-3-phosphoethanolamine-N-(cyanur)(16:0 Cyanur PE).

[0022] In some aspects, the AM comprises a vitamin comprising tocopherol, tocotrienol, vitamin D, vitamin K, riboflavin, niacin, or pyridoxine. In some aspects, the vitamin is tocopherol. In some aspects, the AM is attached to an exterior surface of the EV.

[0023] In some aspects, the BAM comprises a peptide, a polypeptidyl, a polynucleotidyl, a protein, an antibody or an antigen binding fragment thereof, a chemical compound, or any combination thereof. In some aspects, BAM comprises an antisense oligonucleotidyl (ASO), siRNA, miRNA, shRNA, a nucleic acid, or any combination thereof. In some aspects, BAM comprises an ASO. In some aspects, the ASO targets a transcript. In some aspects, the transcript is a STAT6 transcript, an EGFP transcript, a CEBP/β transcript, a STAT3 transcript, a KRAS transcript, an NRAS transcript, an NLPR3 transcript, an FFLUC transcript, an RLUC transcript, a MYC transcript, or any combination thereof.

[0024] In some aspects, SP₁, SP₂, SP₃, and SP₄ are the same or different and each comprises an alkylenyl, a polyoxyalkylenyl, a succinimido, a maleimido, an aryl, an ether, a carbonyl, a carboxylato, a carbamoyl, a thioether, a sulfo, a thiocarbonyl, a thiocarbamoyl, a thiosuccinimido, an amino, an amido, a hydrazido, a phosphorothioato, a 1,2,3-triazolyl, a dibenzoylcyclooctenyl, a bicyclononenyl, a p-aminobenzoyl, a p-aminobenzylcarbamato, or a combination thereof, and at least one of SP₁, SP₂, SP₃, and SP₄ is present. In some aspects, at least one of SP₁, SP₂, SP₃, and SP₄ comprises C₁₋₈ alkylenyl, polyoxyalkenyl, a maleimido, a carbamoyl, a thio, an amido, a 1,2,3-triazolyl, a dibenzoylcyclooctenyl, a bicyclononenyl, a p-aminobenzoyl, a p-aminobenzylcarbamato, or a combination thereof. In some aspects, at least one of SP₁, SP₂, SP₃, and SP₄ comprises C₁₋₆ alkylenyl (i.e., C₁ alkylenyl, C₂ alkylenyl, C₃ alkylenyl, C₄ alkylenyl, C₅ alkylenyl, or C₆ alkylenyl). In some aspects, at least one of SP₁, SP₂, SP₃, and SP₄ comprises a polyoxyalkylenyl that comprises 2 to 15-OCH₂CH₂— repeat units. In some aspects, wherein at least one of SP₁, SP₂, SP₃, and SP₄ further comprises a carbamoyl, an amino, an amido, a thiosuccinimido, a 1,2,3-triazolylbicyclononenyl, or a combination thereof.

[0025] In some aspects, SP₁ is present in Formula I or II. In some aspects, SP₂ is present in Formula I or II. In some aspects, SP₃ is present in Formula I or II. In some aspects, SP₄ is present in Formula I. In some aspects, SP₁ and SP₂ are both present in Formula I or II. In some aspects, SP₁ and SP₃ are both present in Formula I or II. In some aspects, SP₁ and SP₄ are both present in Formula I. In some aspects, SP₂ and SP₃ are both present in Formula I or II. In some aspects, SP₂ and SP₄ are both present in Formula I. In some aspects, SP₃ and SP₄ are both present in Formula I. In some aspects, SP₁, SP₂, and SP₃ are present in Formula I or II. In some aspects, SP₁, SP₂, and SP₄ are present in Formula I. In some aspects, SP₂, SP₃, and SP₄ are present in Formula I. In some aspects, SP₁, SP₂, SP₃, and SP₄ are present in Formula I.

[0026] In some aspects, Formula I or II is a construct selected from

[chemical structure]

[chemical structure]

[chemical structure]

[chemical structure]

[chemical structure]

wherein the cell-penetrating peptide (CPP) is Antp (a peptidyl of the sequence RQIKIWFQNRRMKWKK (SEQ ID NO: 62)), R6 (a peptidyl of the sequence RRRRRR (SEQ ID NO: 87)), or cTAT (a peptide of sequence KRRRGRKKRRE (wherein K and E are connected to form a cyclic peptide)(SEQ ID NO: 88)), and

[chemical structure]

[0027] The present disclosure provides a pharmaceutical composition comprising the EV described herein and a pharmaceutically acceptable carrier.

[0028] The present disclosure also provides a kit comprising the EV described herein or a pharmaceutical composition thereof and instructions for use.

[0029] The present disclosure provides a method of treating or preventing a disease or disorder in a subject in need thereof comprising administering an effective amount of the EV described herein or a pharmaceutical composition thereof to the subject. In some aspects, the disease or disorder is a cancer, graft-versus-host disease (GvHD), an autoimmune disease, an infectious disease, a fibrotic disease, an inflammatory disease, a neurodegenerative disorder, a central nervous disease, a muscular dystrophy disease, or a metabolic disease.

### BRIEF DESCRIPTION OF THE DRAWINGS/FIGURES

[0030] FIG. 1 is a schematic view showing the general structure of an exosome (left), an exemplary biologically active molecule (e.g., an oligonucleotide) connected to a ligand that allows the attachment to the exterior surface of the exosome via a linker (center), and how the biologically active molecule (e.g., an oligonucleotide) connected to an anchoring moiety (e.g., a lipid, such as cholesterol) via a linker can be attached to the membrane of the exosome (right).

[0031] FIG. 2 shows the sequences of exemplary ASOs. FFLUC and RLUC are named after the luminescent reporter genes targeted. The MYC and STAT6 ASO are named after the genes targeted by the ASO. Nb: LNA residues (including LNA-5MeC and LNA T/LNA-5MeU). Nm: 2′-O′MOE residues (including MOE-5MeC and MOE-T/MOED-5MeU). dN: DNA residues. (5MdC): 5-Methyl-dC. s: phosphonothioate backbone modification.

[0032] FIG. 3 is a table of some properties of lipid-linker-ASO stock solutions.

[0033] FIG. 4 is a bar graph of the average diameters (nm) of reconstituted lipid-linker-ASO (-CPP) after filtration by a 0.2 μm filter.

[0034] FIG. 5 is a table of some properties of loaded ASO concentrations.

[0035] FIG. 6 is a bar graph of the loading density of exemplary exoASOs, which represents the number of ASOs loaded per number of exosomes.

[0036] FIG. 7 is graph of the IC₅₀ values (nm) of exemplary exoASOs.

[0037] FIG. 8 is a graph of IC₅₀ values (nm) of exemplary exoASOs normalized to the loading density. The “*” means that the ASO was loaded under unoptimized loading conditions, such that the loading density has the potential of further improvement.

[0038] FIG. 9 is a table of some properties of exoASO, including loaded ASO concentrations and IC₅₀.

[0039] FIG. 10 is a graph of percent gene expression (hSTAT6) normalized to ASO concentration (nM) of various exoASOS for ASO numbers 1 to 11.

[0040] FIG. 11 is a graph of percent gene expression (hSTAT6) normalized to exo concentration of various exoASOs for ASO numbers 1 to 11.

[0041] FIG. 12 is a graph of IC₅₀ comparison normalized to ASO concentration (nM) for ASO numbers 1 to 11.

[0042] FIG. 13 is a graph of IC₅₀ comparison normalized to exosome concentration (p/mL) for ASO numbers 1 to 11.

[0043] FIG. 14 is a graph of mSTAT6 knockdown (KD) in mouse liver with a single dose of exoASO (5 or 10 μg dose based on ASO weight) with various cleavable linkers and cell penetrating pepetide (CPP).

### DETAILED DESCRIPTION

[0044] The present disclosure is directed to extracellular vesicles (EVs), e.g., exosomes, comprising at least one biologically active molecule covalently linked to the EV, e.g., exosome, via a cleavable linker and an anchoring moiety and uses thereof. Non-limiting examples of the various aspects are shown in the present disclosure.

[0045] Before the present disclosure is described in greater detail, it is to be understood that this invention is not limited to the particular compositions or process steps described, as such can, of course, vary. As will be apparent to those of skill in the art upon reading this disclosure, each of the individual aspects described and illustrated herein has discrete components and features which can be readily separated from or combined with the features of any of the other several aspects without departing from the scope or spirit of the present invention. Any recited method can be carried out in the order of events recited or in any other order which is logically possible.

[0046] The headings provided herein are not limitations of the various aspects of the disclosure, which can be defined by reference to the specification as a whole. It is also to be understood that the terminology used herein is for the purpose of describing particular aspects only, and is not intended to be limiting, since the scope of the present disclosure will be limited only by the appended claims.

[0047] Accordingly, the terms defined immediately below are more fully defined by reference to the specification in its entirety.

### Definitions

[0048] In order that the present description can be more readily understood, certain terms are first defined. Additional definitions are set forth throughout the detailed description.

[0049] It is to be noted that the term “a” or “an” entity refers to one or more of that entity; for example, “a nucleotide sequence,” is understood to represent one or more nucleotide sequences. As such, the terms “a” (or “an”), “one or more,” and “at least one” can be used interchangeably herein. It is further noted that the claims can be drafted to exclude any optional element. As such, this statement is intended to serve as antecedent basis for use of such exclusive terminology as “solely,” “only” and the like in connection with the recitation of claim elements, or use of a negative limitation.

[0050] Furthermore, “and/or” where used herein is to be taken as specific disclosure of each of the two specified features or components with or without the other. Thus, the term “and/or” as used in a phrase such as “A and/or B” herein is intended to include “A and B,” “A or B,” “A” (alone), and “B” (alone). Likewise, the term “and/or” as used in a phrase such as “A, B, and/or C” is intended to encompass each of the following aspects: A, B, and C; A, B, or C; A or C; A or B; B or C; A and C; A and B; B and C; A (alone); B (alone); and C(alone).

[0051] It is understood that wherever aspects are described herein with the language “comprising,” otherwise analogous aspects described in terms of “consisting of” and/or “consisting essentially of” are also provided.

[0052] Unless defined otherwise, all technical and scientific terms used herein have the same meaning as commonly understood by one of ordinary skill in the art to which this disclosure is related. For example, the Concise Dictionary of Biomedicine and Molecular Biology, Juo, Pei-Show, 2nd ed., 2002, CRC Press; The Dictionary of Cell and Molecular Biology, 3rd ed., 1999, Academic Press; and the Oxford Dictionary of Biochemistry and Molecular Biology, Revised, 2000, Oxford University Press, provide one of skill with a general dictionary of many of the terms used in this disclosure.

[0053] Units, prefixes, and symbols are denoted in their Système International de Unites (SI) accepted form. Numeric ranges are inclusive of the numbers defining the range. Where a range of values is recited, it is to be understood that each intervening integer value, and each fraction thereof, between the recited upper and lower limits of that range is also specifically disclosed, along with each subrange between such values. The upper and lower limits of any range can independently be included in or excluded from the range, and each range where either, neither or both limits are included is also encompassed within the disclosure. Thus, ranges recited herein are understood to be shorthand for all of the values within the range, inclusive of the recited endpoints. For example, a range of 1 to 10 is understood to include any number, combination of numbers, or sub-range from the group consisting of 1, 2, 3, 4, 5, 6, 7, 8, 9, and 10.

[0054] Where a value is explicitly recited, it is to be understood that values which are about the same quantity or amount as the recited value are also within the scope of the disclosure. Where a combination is disclosed, each subcombination of the elements of that combination is also specifically disclosed and is within the scope of the disclosure. Conversely, where different elements or groups of elements are individually disclosed, combinations thereof are also disclosed. Where any element of a disclosure is disclosed as having a plurality of alternatives, examples of that disclosure in which each alternative is excluded singly or in any combination with the other alternatives are also hereby disclosed; more than one element of a disclosure can have such exclusions, and all combinations of elements having such exclusions are hereby disclosed.

[0055] Nucleotides are referred to by their commonly accepted single-letter codes. Unless otherwise indicated, nucleotide sequences are written left to right in 5′ to 3′ orientation. Nucleotides are referred to herein by their commonly known one-letter symbols recommended by the IUPAC-IUB Biochemical Nomenclature Commission. Accordingly, A represents adenine, C represents cytosine, G represents guanine, T represents thymine, U represents uracil.

[0056] Amino acid sequences are written left to right in amino to carboxy orientation. Amino acids are referred to herein by either their commonly known three letter symbols or by the one-letter symbols recommended by the IUPAC-IUB Biochemical Nomenclature Commission.

[0057] The term “about” is used herein to mean approximately, roughly, around, or in the regions of. When the term “about” is used in conjunction with a numerical range, it modifies that range by extending the boundaries above and below the numerical values set forth. In general, the term “about” can modify a numerical value above and below the stated value by a variance of, e.g., 10 percent, up or down (higher or lower).

[0058] The terms “administration,” “administering,” and grammatical variants thereof refer to introducing a composition, such as an EV (e.g., exosome) of the present disclosure, into a subject via a pharmaceutically acceptable route. The introduction of a composition, such as an EV (e.g., exosome) of the present disclosure, into a subject is by any suitable route, including intratumorally, orally, pulmonarily, intranasally, parenterally (intravenously, intra-arterially, intramuscularly, intraperitoneally, or subcutaneously), rectally, intralymphatically, intrathecally, periocularly or topically. Administration includes self-administration and the administration by another. A suitable route of administration allows the composition or the agent to perform its intended function. For example, if a suitable route is intravenous, the composition is administered by introducing the composition or agent into a vein of the subject.

[0059] As used herein, the term “agonist” refers to a molecule that binds to a receptor and activates the receptor to produce a biological response. Receptors can be activated by either an endogenous or an exogenous agonist. Non-limiting examples of endogenous agonist include hormones, neurotransmitters, and cyclic dinucleotides. Non-limiting examples of exogenous agonist include drugs, small molecules, and cyclic dinucleotides. The agonist can be a full, partial, or inverse agonist.

[0060] The term “amino acid substitution” refers to replacing an amino acid residue present in a parent or reference sequence (e.g., a wild type sequence) with another amino acid residue. An amino acid can be substituted in a parent or reference sequence (e.g., a wild type polypeptide sequence), for example, via chemical peptide synthesis or through recombinant methods known in the art. Accordingly, a reference to a “substitution at position X” refers to the substitution of an amino acid present at position X with an alternative amino acid residue. In some aspects, substitution patterns can be described according to the schema AnY, wherein A is the single letter code corresponding to the amino acid naturally or originally present at position n, and Y is the substituting amino acid residue. In other aspects, substitution patterns can be described according to the schema An (YZ), wherein A is the single letter code corresponding to the amino acid residue substituting the amino acid naturally or originally present at position n, and Y and Z are alternative substituting amino acid residues that can replace A.

[0061] As used herein, the term “antagonist” refers to a molecule that blocks or dampens an agonist mediated response rather than provoking a biological response itself upon bind to a receptor. Many antagonists achieve their potency by competing with endogenous ligands or substrates at structurally defined binding sites on the receptors. Non-limiting examples of antagonists include alpha blockers, beta-blocker, and calcium channel blockers. The antagonist can be a competitive, non-competitive, or uncompetitive antagonist.

[0062] As used herein, the term “antibody” encompasses an immunoglobulin whether natural or partly or wholly synthetically produced, and fragments thereof. The term also covers any protein having a binding domain that is homologous to an immunoglobulin binding domain. “Antibody” further includes a polypeptide comprising a framework region from an immunoglobulin gene or fragments thereof that specifically binds and recognizes an antigen. Use of the term antibody is meant to include whole antibodies, polyclonal, monoclonal and recombinant antibodies, fragments thereof, and further includes single-chain antibodies, humanized antibodies, murine antibodies, chimeric, mouse-human, mouse-primate, primate-human monoclonal antibodies, anti-idiotype antibodies, antibody fragments, such as, e.g., scFv, (scFv) 2, Fab, Fab′, and F (ab′)₂, F (ab1)₂, Fv, dAb, and Fd fragments, diabodies, and antibody-related polypeptides. Antibody includes bispecific antibodies and multispecific antibodies so long as they exhibit the desired biological activity or function. In some aspects of the present disclosure, the biologically active molecule is an antibody or a molecule comprising an antigen binding fragment thereof.

[0063] The terms “antibody-drug conjugate” and “ADC” are used interchangeably and refer to an antibody linked, e.g., covalently, to a therapeutic agent (sometimes referred to herein as agent, drug, or active pharmaceutical ingredient) or agents. In some aspects of the present disclosure, the biologically active molecule is an antibody-drug conjugate.

[0064] As used herein, the term “approximately,” as applied to one or more values of interest, refers to a value that is similar to a stated reference value. In certain aspects, the term “approximately” refers to a range of values that fall within 10%, 9%, 8%, 7%, 6%, 5%, 4%, 3%, 2%, 1%, or less in either direction (greater than or less than) of the stated reference value unless otherwise stated or otherwise evident from the context (except where such number would exceed 100% of a possible value).

[0065] The term “biologically active molecule” as use herein refers to any molecule that can be attached to an EV, e.g., exosome, via an anchoring moiety, wherein the molecule can have a therapeutic or prophylactic effect in a subject in need thereof, or be used for diagnostic purposes. Accordingly, by way of example, the term biologically active molecule includes proteins (e.g., antibodies, proteins, polypeptides, and derivatives, fragments, and variants thereof), lipids and derivatives thereof, carbohydrates (e.g., glycan portions in glycoproteins), or small molecules (e.g., a molecule with a molecular weight of 1000 g/mol or less). In some aspects, the biologically active molecule includes a radioisotope. In some aspects, the biologically active molecule is a detectable moiety, e.g., a radionuclide, a fluorescent molecule, or a contrast agent. In some aspects, the biologically active molecule can be or can comprise a targeting moiety or a tropism moiety. In some aspects, the biologically active molecule can be or can comprise, for example, an affinity ligand (e.g., biotin, digoxigenin, or dinitrophenol). In some aspects, the biologically active molecule can be or can comprise a moiety capable of improving a pharmacokinetic or pharmacodynamic property, for example, a moiety capable in increasing the plasma half-life, e.g., a PEG moiety.

[0066] A “conservative amino acid substitution” is one in which the amino acid residue is replaced with an amino acid residue having a similar side chain. Families of amino acid residues having similar side chains have been defined in the art, including basic side chains (e.g., lysine, arginine, histidine), acidic side chains (e.g., aspartic acid, glutamic acid), uncharged polar side chains (e.g., glycine, asparagine, glutamine, serine, threonine, tyrosine, cysteine), nonpolar side chains (e.g., alanine, valine, leucine, isoleucine, proline, phenylalanine, methionine, tryptophan), beta-branched side chains (e.g., threonine, valine, isoleucine) and aromatic side chains (e.g., tyrosine, phenylalanine, tryptophan, histidine). Thus, if an amino acid in a polypeptide is replaced with another amino acid from the same side chain family, the substitution is considered to be conservative. In another aspect, a string of amino acids can be conservatively replaced with a structurally similar string that differs in order and/or composition of side chain family members.

[0067] As used herein, the term “conserved” refers to nucleotides or amino acid residues of a polynucleotide sequence or polypeptide sequence, respectively, that are those that occur unaltered in the same position of two or more sequences being compared. Nucleotides or amino acids that are relatively conserved are those that are conserved amongst more related sequences than nucleotides or amino acids appearing elsewhere in the sequences.

[0068] In some aspects, two or more sequences are said to be “completely conserved” or “identical” if they are 100% identical to one another. In some aspects, two or more sequences are said to be “highly conserved” if they are about 70% identical or higher, e.g., about 80% identical, about 90% identical, about 95%, about 98%, or about 99% identical to one another. In some aspects, two or more sequences are said to be “conserved” if they are up to about 70% identical, including about 30% identical, about 40% identical, about 50% identical, about 60% identical, or about 65% identical, to one another. Conservation of sequence can apply to the entire length of a polynucleotide or polypeptide or can apply to a portion, region, or feature thereof.

[0069] As used herein, the term “conventional EV protein” means a protein previously known to be enriched in EVs.

[0070] As used herein, the term “conventional exosome protein” means a protein previously known to be enriched in exosomes, including but not limited to CD9, CD63, CD81, PDGFR, GPI anchor proteins, lactadherin LAMP2, and LAMP2B, a fragment thereof, or a peptide that binds thereto.

[0071] The term “derivative” as used herein refers to an EV, e.g., exosome, component (e.g., a protein, such as Scaffold X, a lipid, or a carbohydrate) or to a biologically active molecule (e.g., a polypeptide, polynucleotide, lipid, carbohydrate, antibody or fragment thereof, PROTAC, etc.) that has been chemically modified to introduce at least one reactive moiety (e.g., a phosphoramidite moiety).

[0072] The terms “excipient” and “carrier” are used interchangeably and refer to an inert substance added to a pharmaceutical composition to further facilitate administration of a compound or EV.

[0073] As used herein, the terms “extracellular vesicle,” “EV,” and grammatical variants thereof, are used interchangeably and refer to a cell-derived vesicle comprising a membrane that encloses an internal space. Extracellular vesicles comprise all membrane-bound vesicles (e.g., an exosome, a microvesicle, a nanovesicle, an ectosome, an oncosome, or an apoptotic body) that have a smaller diameter than the cell from which they are derived. In some aspects, extracellular vesicles range in diameter from 20 nm to 1000 nm (e.g., 50 nm to 1000 nm, 50 nm to 200 nm, or 200 nm to 1000 nm), and can comprise various macromolecular payload either within the internal space (i.e., lumen), displayed on the external surface of the extracellular vesicle, and/or spanning the membrane. In some aspects, the payload can comprise nucleic acids, proteins, carbohydrates, lipids, small molecules, and/or combinations thereof. In certain aspects, an extracellular vehicle comprises a scaffold moiety. By way of example and without limitation, extracellular vesicles include apoptotic bodies, fragments of cells, vesicles derived from cells by direct or indirect manipulation (e.g., by serial extrusion or treatment with alkaline solutions), vesiculated organelles, and vesicles produced by living cells (e.g., by direct plasma membrane budding or fusion of the late endosome with the plasma membrane). Extracellular vesicles can be derived from a living or dead organism, explanted tissues or organs, prokaryotic or eukaryotic cells, and/or cultured cells. In some aspects, the extracellular vesicles are produced by cells that express one or more transgene products.

[0074] As used herein, the term “exosome” refers to an extracellular vesicle with a diameter between 20-300 nm (e.g., 40-200 nm, 50-200 nm). Exosomes comprise a membrane that encloses an internal space (i.e., lumen), and, in some aspects, can be generated from a cell (e.g., producer cell) by direct plasma membrane budding or by fusion of the late endosome with the plasma membrane. In certain aspects, an exosome comprises a scaffold moiety. As described infra, exosome can be derived from a producer cell, and isolated from the producer cell based on its size, density, biochemical parameters, or a combination thereof. In some aspects, the exosomes of the present disclosure are produced by cells that express one or more transgene products.

[0075] In some aspects, EVs, e.g., exosomes, e.g., nanovesicles, of the present disclosure are engineered by covalently linking at least one biologically active molecule (e.g., a protein such as an antibody or antibody drug conjugate (ADC), a ribonucleic acid (RNA) or deoxyribonucleic acid (DNA), such as an antisense oligonucleotide, a small molecule drug, or a small molecule toxin) to the EV, e.g., exosome or nanovesicle, via an anchoring moiety.

[0076] In some aspects, the EVs, e.g., exosomes or nanovesicles, of the present disclosure can comprise various macromolecular payloads either within the internal space (i.e., lumen), displayed on the external (exterior) surface or internal (luminal) surface of the EV, and/or spanning the membrane. In some aspects, the payload can comprise, e.g., nucleic acids, proteins, carbohydrates, lipids, small molecules, and combinations thereof. In certain aspects, an EV, e.g., an exosome, comprises a scaffold moiety (e.g., Scaffold X). EVs, e.g., exosomes, can be derived from a living or a dead organism, explanted tissues or organs, prokaryotic or eukaryotic cells, and/or cultured cells. In some aspects, the EVs, e.g., exosomes, are produced by cells that express one or more transgene products. In other aspects, the EVs of the present disclosure are without limitation nanovesicles, microsomes, microvesicles, extracellular bodies, or apoptotic bodies.

[0077] A schematic view of the general structure of an exosome, an exemplary biologically active molecule (e.g., an oligonucleotide) connected to a ligand (e.g., anchoring moiety) that allows the attachment to the exterior surface of the exosome via a linker, and how the biologically active molecule (e.g., an oligonucleotide) connected to an anchoring moiety (e.g., a lipid, such as cholesterol) via a linker can be attached to the membrane of the exosome, are shown in FIG. 1. In some aspects, the AM is attached to an exterior surface of the EV.

[0078] As used herein, the term “fragment” of a protein (e.g., a biologically active molecule such as a therapeutic protein, or a scaffold protein such as Scaffold X) refers to an amino acid sequence of a protein that is shorter than the naturally-occurring sequence, N- and/or C-terminally deleted or any part of the protein deleted in comparison to the naturally occurring protein.

[0079] As used herein, the term “functional fragment” refers to a protein fragment that retains protein function. Accordingly, in some aspects, a functional fragment of a Scaffold protein, e.g., Scaffold X protein, retains the ability to anchor a biologically active molecule on the luminal surface or on the external surface of the EV, e.g., exosome.

[0080] Whether a fragment is a functional fragment can be assessed by any art known methods to determine the protein content of EVs, e.g., exosomes, including Western Blots, fluorescence activated cell sorting (FACS) analysis and fusions of the fragments with autofluorescent proteins like, e.g., green fluorescent protein (GFP). In certain aspects, a functional fragment of a Scaffold X protein retains, e.g., at least 50%, at least 60%, at least 70%, at least 80%, at least 90%, at least 95%, or about 100% of the ability of the naturally occurring Scaffold X protein to anchor a biologically active molecule on the luminal or on the external surface of the EV, e.g., exosome.

[0081] As used herein “anchoring” a biologically active molecule on the luminal or external surface of an EV (e.g., exosome) of the present disclosure via a scaffold protein refers to attaching covalently or non-covalently the biologically active molecule to the portion of the scaffold molecule located on a luminal or external surface of the EV (e.g., exosome), respectively.

[0082] As used herein, the term “homology” refers to the overall relatedness between polymeric molecules, e.g., between nucleic acid molecules (e.g., DNA molecules and/or RNA molecules) and/or between polypeptide molecules. Generally, the term “homology” implies an evolutionary relationship between two molecules. Thus, two molecules that are homologous will have a common evolutionary ancestor. In the context of the present disclosure, the term homology encompasses both to identity and similarity.

[0083] In some aspects, polymeric molecules are considered to be “homologous” to one another if at least 25%, 30%, 35%, 40%, 45%, 50%, 55%, 60%, 65%, 70%, 75%, 80%, 85%, 90%, 95%, or 99% of the monomers in the molecule are identical (exactly the same monomer) or are similar (conservative substitutions). The term “homologous” necessarily refers to a comparison between at least two sequences (polynucleotide or polypeptide sequences).

[0084] In the context of the present disclosure, substitutions (even when they are referred to as amino acid substitution) are conducted at the nucleic acid level, i.e., substituting an amino acid residue with an alternative amino acid residue is conducted by substituting the codon encoding the first amino acid with a codon encoding the second amino acid.

[0085] As used herein, the term “identity” refers to the overall monomer conservation between polymeric molecules, e.g., between polypeptide molecules or polynucleotide molecules (e.g., DNA molecules and/or RNA molecules). The term “identical” without any additional qualifiers, e.g., protein A is identical to protein B, implies the sequences are 100% identical (100% sequence identity). Describing two sequences as, e.g., “70% identical,” is equivalent to describing them as having, e.g., “70% sequence identity.”

[0086] Calculation of the percent identity of two polypeptide sequences, for example, can be performed by aligning the two sequences for optimal comparison purposes (e.g., gaps can be introduced in one or both of a first and a second polypeptide sequences for optimal alignment and non-identical sequences can be disregarded for comparison purposes). In certain aspects, the length of a sequence aligned for comparison purposes is at least 30%, at least 40%, at least 50%, at least 60%, at least 70%, at least 80%, at least 90%, at least 95%, or 100% of the length of the reference sequence. The amino acids at corresponding amino acid positions are then compared.

[0087] When a position in the first sequence is occupied by the same amino acid as the corresponding position in the second sequence, then the molecules are identical at that position. The percent identity between the two sequences is a function of the number of identical positions shared by the sequences, taking into account the number of gaps, and the length of each gap, which needs to be introduced for optimal alignment of the two sequences. The comparison of sequences and determination of percent identity between two sequences can be accomplished using a mathematical algorithm.

[0088] Suitable software programs are available from various sources, and for alignment of both protein and nucleotide sequences. One suitable program to determine percent sequence identity is b12seq, part of the BLAST (Basic Local Alignment Search Tool) suite of program available from the U.S. government's National Center for Biotechnology Information BLAST web site (blast.ncbi.nlm.nih.gov). B12seq performs a comparison between two sequences using either the BLASTN or BLASTP algorithm. BLASTN is used to compare nucleic acid sequences, while BLASTP is used to compare amino acid sequences. Other suitable programs are, e.g., Needle, Stretcher, Water, or Matcher, part of the EMBOSS suite of bioinformatics programs and also available from the European Bioinformatics Institute (EBI) at www.ebi.ac.uk/Tools/psa.

[0089] Sequence alignments can be conducted using methods known in the art such as MAFFT (multiple alignment using fast Fourier Transform), Clustal (ClustalW, Clustal X or Clustal Omega), MUSCLE (multiple sequence comparison by log expectation), etc.

[0090] Different regions within a single polynucleotide or polypeptide target sequence that aligns with a polynucleotide or polypeptide reference sequence can each have their own percent sequence identity. It is noted that the percent sequence identity value is rounded to the nearest tenth. For example, 80.11, 80.12, 80.13, and 80.14 are rounded down to 80.1, while 80.15, 80.16, 80.17, 80.18, and 80.19 are rounded up to 80.2. It also is noted that the length value will always be an integer.

[0091] In certain aspects, the percentage identity (% ID) or of a first amino acid sequence (or nucleic acid sequence) to a second amino acid sequence (or nucleic acid sequence) is calculated as % ID=100×(Y/Z), where Y is the number of amino acid residues (or nucleobases) scored as identical matches in the alignment of the first and second sequences (as aligned by visual inspection or a particular sequence alignment program) and Z is the total number of residues in the second sequence. If the length of a first sequence is longer than the second sequence, the percent identity of the first sequence to the second sequence will be higher than the percent identity of the second sequence to the first sequence.

[0092] One skilled in the art will appreciate that the generation of a sequence alignment for the calculation of a percent sequence identity is not limited to binary sequence-sequence comparisons exclusively driven by primary sequence data. It will also be appreciated that sequence alignments can be generated by integrating sequence data with data from heterogeneous sources such as structural data (e.g., crystallographic protein structures), functional data (e.g., location of mutations), or phylogenetic data. A suitable program that integrates heterogeneous data to generate a multiple sequence alignment is T-Coffee, available at www.tcoffee.org, and alternatively available, e.g., from the EBI. It will also be appreciated that the final alignment used to calculate percent sequence identity can be curated either automatically or manually.

[0093] As used herein, the terms “isolated,” “purified,” “extracted,” and grammatical variants thereof are used interchangeably and refer to the state of a preparation of desired EVs (e.g., a plurality of EVs of known or unknown amount and/or concentration), that has undergone one or more processes of purification, e.g., a selection or an enrichment of the desired EV, e.g., exosome, preparation. In some aspects, isolating or purifying as used herein is the process of removing, partially removing (e.g., a fraction) of the EVs, e.g., exosomes, from a sample containing producer cells. In some aspects, an isolated EV, e.g., exosome, composition has no detectable undesired activity or, alternatively, the level or amount of the undesired activity is at or below an acceptable level or amount. In other aspects, an isolated EV, e.g., exosome, composition has an amount and/or concentration of desired EVs, e.g., exosomes, at or above an acceptable amount and/or concentration. In other aspects, the isolated EVs, e.g., exosome, composition is enriched as compared to the starting material (e.g., producer cell preparations) from which the composition is obtained. This enrichment can be by at least 10%, at least 20%, at least 30%, at least 40%, at least 50%, at least 60%, at least 70%, at least 80%, at least 90%, at least 95%, at least 96%, at least 97%, at least 98%, at least 99%, at least 99.9%, at least 99.99%, at least 99.999%, at least 99.9999%, or greater than 99.9999% as compared to the starting material. In some aspects, isolated EV, e.g., exosome, preparations are substantially free of residual biological products. In some aspects, the isolated EV, e.g., exosome, preparations are 100% free, at least 99% free, at least 98% free, at least 97% free, at least 96% free, at least 95% free, at least 94% free, at least 93% free, at least 92% free, at least 91% free, or at least 90% free of any contaminating biological matter. Residual biological products can include abiotic materials (including chemicals) or unecessary nucleic acids, proteins, lipids, and/or metabolites. Substantially free of residual biological products can also mean that the EV, e.g., exosome, composition contains no detectable producer cells and that only EVs, e.g., exosomes, are detectable.

[0094] The terms “linked,” “fused,” and grammatical variants thereof are used interchangeably and refer to a first moiety, e.g., a first amino acid sequence or nucleotide sequence, covalently or non-covalently joined to a second moiety, e.g., a second amino acid sequence, nucleotide sequence, and/or a lipid (e.g., cholesterol), respectively. The first moiety can be directly joined or juxtaposed to the second moiety or alternatively an intervening moiety can covalently join the first moiety to the second moiety. The term “linked” means not only a fusion of a first moiety to a second moiety at the C-terminus or the N-terminus, but also includes insertion of the whole first moiety (or the second moiety) into any two points, e.g., amino acids, in the second moiety (or the first moiety, respectively). In one aspect, the first moiety is linked to a second moiety by a peptide bond or a linker. The first moiety can be linked to a second moiety by a phosphodiester bond or a linker. The linker can be a peptide or a polypeptide (for polypeptide chains) or a nucleotide or a nucleotide chain (for nucleotide chains) or any chemical moiety (for polypeptide or polynucleotide chains or any chemical molecules). The term “linked” is also indicated by a hyphen (-). In some aspects, a Scaffold X protein on an EV, e.g., exosome, can be linked or fused to a biologically active molecule via a linker, a spacer, or both a linker and a spacer.

[0095] The term “modified,” when used in the context of EVs, e.g., exosomes, described herein, refers to an alteration or engineering of an EV, e.g., exosome and/or its producer cell, such that the modified EV, e.g., exosome, is different from a naturally-occurring EV, e.g., exosome. In some aspects, a modified EV, e.g., exosome, described herein comprises a membrane that differs in composition of a protein, a lipid, a small molecule, a carbohydrate, etc. compared to the membrane of a naturally-occurring EV, e.g., exosome. In an aspect, the membrane comprises higher density or number of natural EV, e.g., exosome, proteins and/or membrane comprises proteins that are not naturally found in EV, e.g., exosomes. In certain aspects, such modifications to the membrane change the exterior surface of the EV, e.g., exosome (e.g., surface-engineered EVs and exosomes described herein).

[0096] As used herein the terms “modified protein” or “protein modification” refers to a protein having at least 15% identity to the non-mutant amino acid sequence of the protein. A modification of a protein includes a fragment or a variant of the protein. A modification of a protein can further include chemical or physical modification to a fragment or a variant of the protein.

[0097] As used herein, the terms “modulate,” “modify,” and grammatical variants thereof, generally refer when applied to a specific concentration, level, expression, function or behavior, to the ability to alter, by increasing or decreasing, e.g., directly or indirectly promoting/stimulating/up-regulating or interfering with/inhibiting/down-regulating the specific concentration, level, expression, function or behavior, such as, e.g., to act as an antagonist or agonist. In some instances, a modulator can increase and/or decrease a certain concentration, level, activity or function relative to a control, or relative to the average level of activity that would generally be expected or relative to a control level of activity.

[0098] As used herein, the term “nanovesicle” refers to an extracellular vesicle with a diameter between 20-250 nm (e.g., between 30-150 nm) and is generated from a cell (e.g., producer cell) by direct or indirect manipulation such that the nanovesicle would not be produced by the cell without the manipulation. Appropriate manipulations of the cell to produce the nanovesicles include but are not limited to serial extrusion, treatment with alkaline solutions, sonication, or combinations thereof. In some aspects, production of nanovesicles can result in the destruction of the producer cell. In some aspects, population of nanovesicles described herein are substantially free of vesicles that are derived from cells by way of direct budding from the plasma membrane or fusion of the late endosome with the plasma membrane. In certain aspects, a nanovesicle comprises a scaffold moiety, e.g., Scaffold X. Nanovesicles, once derived from a producer cell, can be isolated from the producer cell based on its size, density, biochemical parameters, or a combination thereof.

[0099] As used herein, the term “payload” refers to a biologically active molecule (e.g., a therapeutic agent) that acts on a target (e.g., a target cell) that is contacted with the EV, e.g., exosome, of the present disclosure. Non-limiting examples of payloads that can be introduced into an EV, e.g., exosome, include therapeutic agents such as, nucleotides (e.g., nucleotides comprising a detectable moiety or a toxin or that disrupt transcription), nucleic acids (e.g., DNA or mRNA molecules that encode a polypeptide such as an enzyme, or RNA molecules that have regulatory function such as miRNA, dsDNA, lncRNA, and siRNA), amino acids (e.g., amino acids comprising a detectable moiety or a toxin or that disrupt translation), polypeptides (e.g., enzymes), lipids, carbohydrates, and small molecules (e.g., small molecule drugs and toxins). In certain aspects, a payload comprises an antigen. As used herein, the term “antigen” refers to any agent that when introduced into a subject elicits an immune response (cellular or humoral) to itself. In some aspects, the payload molecules are covalently linked to the EV, e.g., exosome, via a linker, a spacer, or both a linker and a spacer, as disclosed herein. In other aspects, a payload comprises an adjuvant.

[0100] The terms “pharmaceutically-acceptable carrier,” “pharmaceutically-acceptable excipient,” and grammatical variations thereof, encompass any of the agents approved by a regulatory agency of the U.S. Federal government or listed in the U.S. Pharmacopeia for use in animals, including humans, as well as any carrier or diluent that does not cause the production of undesirable physiological effects to a degree that prohibits administration of the composition to a subject and does not abrogate the biological activity and properties of the administered compound. Included are excipients and carriers that are useful in preparing a pharmaceutical composition and are generally safe, non-toxic, and desirable.

[0101] As used herein, the term “pharmaceutical composition” refers to one or more of the compounds described herein, such as, e.g., an EV, such as exosome of the present disclosure, mixed or intermingled with, or suspended in one or more other chemical components, such as pharmaceutically-acceptable carriers and excipients. One purpose of a pharmaceutical composition is to facilitate administration of preparations of EVs, e.g., exosomes, to a subject.

[0102] The term “polynucleotide” as used herein refers to polymers of nucleotides of any length, including ribonucleotides, deoxyribonucleotides, analogs thereof, or mixtures thereof. This term refers to the primary structure of the molecule. Thus, the term includes triple-, double- and single-stranded DNA, as well as triple-, double- and single-stranded RNA. It also includes modified, for example by alkylation, and/or by capping, and unmodified forms of the polynucleotide. More particularly, the term “polynucleotide” includes polydeoxyribonucleotides (containing 2-deoxy-D-ribose), polyribonucleotides (containing D-ribose), including tRNA, rRNA, hRNA, siRNA and mRNA, whether spliced or unspliced, any other type of polynucleotide which is an N- or C-glycoside of a purine or pyrimidine base, and other polymers containing normucleotidic backbones, for example, polyamide (e.g., peptide nucleic acids “PNAs”) and polymorpholino polymers, and other synthetic sequence-specific nucleic acid polymers providing that the polymers contain nucleobases in a configuration which allows for base pairing and base stacking, such as is found in DNA and RNA. In some aspects of the present disclosure, the biologically active molecule attached to the EV, e.g., exosome, via a linker, a spacer, or both a linker and a space, as disclosed herein, is a polynucleotide, e.g., an antisense oligonucleotide. In particular aspects, the polynucleotide comprises an mRNA. In other aspect, the mRNA is a synthetic mRNA. In some aspects, the synthetic mRNA comprises at least one unnatural nucleobase. In some aspects, all nucleobases of a certain class have been replaced with unnatural nucleobases (e.g., all uridines in a polynucleotide disclosed herein can be replaced with an unnatural nucleobase, e.g., 5-methoxyuridine). In some aspects of the present disclosure, the biologically active molecule is a polynucleotide (e.g., an antisense oligonucleotide, ASO).

[0103] The terms “polypeptide,” “peptide,” and “protein” are used interchangeably herein to refer to polymers of amino acids of any length. The polymer can comprise modified amino acids. The terms also encompass an amino acid polymer that has been modified naturally or by intervention; for example, disulfide bond formation, glycosylation, lipidation, acetylation, phosphorylation, or any other manipulation or modification, such as conjugation with a labeling component. Also included within the definition are, for example, polypeptides containing one or more analogs of an amino acid (including, for example, unnatural amino acids such as homocysteine, ornithine, p-acetylphenylalanine, D-amino acids, and creatine), as well as other modifications known in the art. In some aspects of the present disclosure, the biologically active molecule attached to the EV, e.g., exosome, via a linker, spacer, or both a linker and a spacer, as disclosed herein, is a polypeptide, e.g., an antibody or a derivative thereof such as an ADC, a proteolysis targeting chimera (PROTAC), a toxin, a fusion protein, or an enzyme.

[0104] The term “polypeptide,” as used herein, refers to proteins, polypeptides, and peptides of any size, structure, or function. Polypeptides include gene products, naturally occurring polypeptides, synthetic polypeptides, homologs, orthologs, paralogs, fragments and other equivalents, variants, and analogs of the foregoing. A polypeptide can be a single polypeptide or can be a multi-molecular complex such as a dimer, trimer or tetramer. They can also comprise single chain or multichain polypeptides. Most commonly disulfide linkages are found in multichain polypeptides. The term polypeptide can also apply to amino acid polymers in which one or more amino acid residues are an artificial chemical analogue of a corresponding naturally occurring amino acid. In some aspects, a “peptide” can be less than or equal to 50 amino acids long, e.g., about 5, 10, 15, 20, 25, 30, 35, 40, 45, or 50 amino acids long.

[0105] The terms “prevent,” “preventing,” and variants thereof as used herein, refer to partially or completely delaying onset of a disease, disorder and/or condition; partially or completely delaying onset of one or more symptoms, features, or clinical manifestations of a particular disease, disorder, and/or condition; partially or completely delaying progression from a particular disease, disorder and/or condition; and/or decreasing the risk of developing pathology associated with a disease, disorder, and/or condition. In some aspects, preventing an outcome is achieved through prophylactic treatment.

[0106] As used herein, the term “producer cell” refers to a cell used for generating an EV, e.g., exosome. A producer cell can be a cell cultured in vitro, or a cell in vivo. A producer cell includes, but not limited to, a cell known to be effective in generating EVs, e.g., exosomes, e.g., HEK293 cells, Chinese hamster ovary (CHO) cells, mesenchymal stem cells (MSCs), BJ human foreskin fibroblast cells, fHDF fibroblast cells, AGE.HN™ neuronal precursor cells, CAP™ amniocyte cells, adipose mesenchymal stem cells, RPTEC/TERTI cells. In certain aspects, a producer cell is not an antigen-presenting cell. In some aspects, a producer cell is not a dendritic cell, a B cell, a mast cell, a macrophage, a neutrophil, Kupffer-Browicz cell, a cell derived from any of these cells, or any combination thereof.

[0107] As used herein, “prophylactic” refers to a therapeutic or course of action used to prevent the onset of a disease or condition, or to prevent or delay a symptom associated with a disease or condition.

[0108] As used herein, a “prophylaxis” refers to a measure taken to maintain health and prevent or delay the onset of a bleeding episode, or to prevent or delay symptoms associated with a disease or condition.

[0109] A “recombinant” polypeptide or protein refers to a polypeptide or protein produced via recombinant DNA technology. Recombinantly produced polypeptides and proteins expressed in engineered host cells are considered isolated for the purpose of the disclosure, as are native or recombinant polypeptides which have been separated, fractionated, or partially or substantially purified by any suitable technique. The polypeptides disclosed herein can be recombinantly produced using methods known in the art. Alternatively, the proteins and peptides disclosed herein can be chemically synthesized. In some aspects of the present disclosure, the Scaffold X proteins present in EVs, e.g., exosomes, are recombinantly produced by overexpressing the scaffold proteins in the producer cells, so that levels of scaffold proteins in the resulting EVs, e.g., exosomes, are increased with respect to the levels of scaffold proteins present in EVs, e.g., exosomes, of producer cells not overexpressing such scaffold proteins.

[0110] As used herein, the term “scaffold moiety” refers to a molecule, e.g., a protein such as Scaffold X, that can be used to anchor a payload, e.g., a biologically active molecule, to the EV, e.g., exosome, e.g., on the external surface of the EV. In certain aspects, a scaffold moiety comprises a synthetic molecule. In some aspects, a scaffold moiety comprises a non-polypeptide moiety. In other aspects, a scaffold moiety comprises, e.g., a lipid, carbohydrate, protein, or combination thereof (e.g., a glycoprotein or a proteolipid) that naturally exists in the EV, e.g., exosome. In some aspects, a scaffold moiety comprises a lipid, carbohydrate, or protein that does not naturally exist in the EV, e.g., exosome. In some aspects, a scaffold moiety comprises a lipid or carbohydrate which naturally exists in the EV, e.g., exosome, but has been enriched in the EV, e.g., exosome with respect to basal/native/wild type levels. In some aspects, a scaffold moiety comprises a protein which naturally exists in the EV, e.g., exosome but has been enriched in the EV, e.g., exosome, for example, by recombinant overexpression in the producer cell, with respect to basal/native/wild type levels. In certain aspects, a scaffold moiety is Scaffold X.

[0111] As used herein, the term “Scaffold X” refers to EV, e.g., exosome, proteins that have been identified on the surface of EVs, e.g., exosomes. See, e.g., U.S. Pat. No. 10,195,290, which is incorporated herein by reference in its entirety. Non-limiting examples of Scaffold X proteins include: prostaglandin F2 receptor negative regulator (“PTGFRN”); basigin (“BSG”); immunoglobulin superfamily member 2 (“IGSF2”); immunoglobulin superfamily member 3 (“IGSF3”); immunoglobulin superfamily member 8 (“IGSF8”); integrin beta-1 (“ITGB1”); integrin alpha-4 (“ITGA4”); 4F2 cell-surface antigen heavy chain (“SLC3A2”); and a class of ATP transporter proteins (“ATP1A1,” “ATPIA2,” “ATPIA3,” “ATPIA4,” “ATPIB3,” “ATP2B1,” “ATP2B2,” “ATP2B3,” “ATP2B”). In some aspects, a Scaffold X protein can be a whole protein or a fragment thereof (e.g., functional fragment, e.g., the smallest fragment that is capable of anchoring another moiety on the external surface or on the luminal surface of the EV, e.g., exosome). In some aspects, a Scaffold X can anchor a biologically active molecule to the external surface or the lumen of the EV, e.g., an exosome. In some aspects of the present disclosure, a biologically active molecule can be covalently attached to a Scaffold X, e.g., via a linker, spacer, or both a linker and a spacer, as disclosed herein. Non-limiting examples of other scaffold moieties that can be used with the present disclosure include: aminopeptidase N (CD13); Neprilysin, AKA membrane metalloendopeptidase (MME); ectonucleotide pyrophosphatase/phosphodiesterase family member 1 (ENPP1); Neuropilin-1 (NRP1); CD9, CD63, CD81, PDGFR, GPI anchor proteins, lactadherin, LAMP2, and LAMP2B.

[0112] As used herein, the term “similarity” refers to the overall relatedness between polymeric molecules, e.g., between polynucleotide molecules (e.g., DNA molecules and/or RNA molecules) and/or between polypeptide molecules. Calculation of percent similarity of polymeric molecules to one another can be performed in the same manner as a calculation of percent identity, except that calculation of percent similarity takes into account conservative substitutions as is understood in the art. It is understood that percentage of similarity is contingent on the comparison scale used, i.e., whether the amino acids are compared, e.g., according to their evolutionary proximity, charge, volume, flexibility, polarity, hydrophobicity, aromaticity, isoelectric point, antigenicity, or combinations thereof.

[0113] As used herein, the term “small molecule” refers to an organic compound with a molecular weight of about 1000 g/mol or less (e.g., about 900 g/mol or less) enabling passage through a cell membrane. The organic compound can be, e.g., a biological molecule, a drug or a toxin. Suitable biological molecules include, e.g., a cyclic dinucleotide, a fatty acid, a sugar (e.g., glucose), an amino acid, a lipid (e.g., cholesterol), a phenolic compound, and an alkaloid. Suitable drugs include, e.g., analgesics, antibacterial agents, antiviral agents, anticonvulsants, antipsychotics, antineoplastics, anti-inflammatory agents, anti-obesity agents, antiparsitics, contraceptives, otic agents, ophthalmic agents, skeletal muscle relaxants, sleep disorder agents, central nervous system agents, cardiovascular agents, blood glucose regulator, immunological agents, infertility agents, respiratory tract agents, tyrosine kinase inhibitors, and mTOR inhibitors. Specific examples include but are not limited to asprin, naproxen, celecoxib, diclofenac, ketorolac, oxycodone, insulin, methotrexate, sulfasalazine, imiquimod, cyclophosphamide, mycophenolate mofetil, marmastat, dimercaprol, doxorubicin, taxol, and paclitaxel. Suitable toxins include, e.g., bacterial toxins, incuding a hemotoxin, a phototoxin, a hepatotoxin, and a neurotoxin, a mycotoxin, an aflaxtoxin, an ochratoxin, a citrinin, and an ergot alkaloid. Specific exmaples include monomethyl auristatin E (MMAE) botulinum toxin A, tetanus toxin A, edema toxin, exotoxin A, cholera toxin, pertussis toxin, diphtheria toxin, dioxin, muscarine, and bufotoxin, or synthetic toxins, such as bisphenol A, perchlorate, tetrachloroethylene, 2-butoxyethanol, and formaldehyde.

[0114] Unless otherwise indicated, reference to a compound that has one or more stereocenters intends each stereoisomer, and all combinations of stereoisomers, thereof.

[0115] The terms “subject,” “patient,” “individual,” and “host,” and variants thereof are used interchangeably herein and refer to any mammalian subject, including without limitation, humans, domestic animals (e.g., dogs, cats and the like), farm animals (e.g., cows, sheep, pigs, horses and the like), and laboratory animals (e.g., monkey, rats, mice, rabbits, guinea pigs and the like) for whom diagnosis, treatment, or therapy is desired, particularly humans. The methods described herein are applicable to both human therapy and veterinary applications.

[0116] As used herein, the term “substantially free” means that the sample comprising EVs, e.g., exosomes, comprises less than 10% of macromolecules, e.g., contaminants, by mass/volume (m/v) percentage concentration. Some fractions may contain less than 0.001%, less than 0.01%, less than 0.05%, less than 0.1%, less than 0.2%, less than 0.3%, less than 0.4%, less than 0.5%, less than 0.6%, less than 0.7%, less than 0.8%, less than 0.9%, less than 1%, less than 2%, less than 3%, less than 4%, less than 5%, less than 6%, less than 7%, less than 8%, less than 9%, or less than 10% (m/v) of macromolecules.

[0117] As used herein the term “surface-engineered EV” (e.g., Scaffold X-engineered exosome) refers to an EV with the membrane or the surface of the EV modified in its composition so that the surface of the engineered EV is different from that of the EV prior to the modification or of the naturally occurring EV.

[0118] As used herein the term “surface-engineered exosome” (e.g., Scaffold X-engineered exosome) refers to an exosome with the membrane or the surface of the exosome (external surface or luminal surface) modified in its composition so that the surface of the engineered exosome is different from that of the exosome prior to the modification or of the naturally occurring exosome.

[0119] The engineering can be on the surface of the EV, e.g., exosome, or in the membrane of the EV, e.g., exosome, so that the surface of the EV, e.g., exosome, is changed. For example, the membrane can be modified in its composition of, e.g., a protein, a lipid, a small molecule, a carbohydrate, or a combination thereof. The composition can be changed by a chemical, a physical, or a biological method or by being produced from a cell previously or concurrently modified by a chemical, a physical, or a biological method. Specifically, the composition can be changed by a genetic engineering or by being produced from a cell previously modified by genetic engineering. In some aspects, a surface-engineered EV, e.g., exosome, comprises an exogenous protein (i.e., a protein that the EV, e.g., exosome, does not naturally express) or a fragment or variant thereof that can be exposed to the surface of the EV, e.g., exosome or can be an anchoring point (attachment) for a moiety exposed on the surface of the EV, e.g., exosome. In other aspects, a surface-engineered EV, e.g., exosome comprises a higher expression (e.g., higher number) of a natural EV, e.g., exosome protein (e.g., Scaffold X) or a fragment or variant thereof that can be exposed to the surface of the EV, e.g., exosome or can be an anchoring point (attachment) for a moiety exposed on the surface of the EV, e.g., exosome. In a specific aspect, a surface-engineered EV, e.g., exosome, comprises the modification of one or more membrane components, e.g., a protein such as Scaffold X, a lipid, a small molecule, a carbohydrate, or a combination thereof, wherein at least one of the components is covalently attached to a biologically active molecule via a linker, spacer, or both a linker and a spacer, as disclosed herein.

[0120] As used herein the term “therapeutically effective amount” is the amount of reagent or pharmaceutical compound comprising an EV or exosome of the present disclosure that is sufficient to a produce a desired therapeutic effect, pharmacologic and/or physiologic effect on a subject in need thereof. A therapeutically effective amount can be a “prophylactically effective amount” as prophylaxis can be considered therapy.

[0121] The terms “treat,” “treatment,” or “treating,” as used herein refers to, e.g., the reduction in severity of a disease or condition; the reduction in the duration of a disease course; the amelioration or elimination of one or more symptoms associated with a disease or condition; the provision of beneficial effects to a subject with a disease or condition to any suitable degree, without necessarily curing the disease or condition. The term also includes prophylaxis or prevention of a disease or condition or its symptoms thereof. In one aspect, the term “treating” or “treatment” means inducing an immune response in a subject against an antigen.

[0122] As used herein, the term “variant” of a molecule (e.g., functional molecule, antigen, or Scaffold X) refers to a molecule that shares certain structural and functional identities with another molecule upon comparison by a method known in the art. For example, a variant of a protein can include a substitution, insertion, deletion, frame shift, or rearrangement in another protein.

[0123] In some aspects, a variant of a Scaffold X or derivative comprises a Scaffold X variant having at least 70% identity to the full-length, mature PTGFRN, BSG, IGSF2, IGSF3, IGSF8, ITGB1, ITGA4, SLC3A2, or ATP transporter proteins or a fragment (e.g., functional fragment) of the PTGFRN, BSG, IGSF2, IGSF3, IGSF8, ITGB1, ITGA4, SLC3A2, or ATP transporter proteins.

[0124] In some aspects, the variant or variant of a fragment of Scaffold X protein disclosed herein, or derivatives thereof, retains the ability to be specifically targeted to EVs, e.g., exosomes. In some aspects, the Scaffold X or Scaffold X derivative includes one or more mutations, for example, conservative amino acid substitutions.

[0125] Naturally occurring variants are called “allelic variants,” and refer to one of several alternate forms of a gene occupying a given locus on a chromosome of an organism (Genes II, Lewin, B., ed., John Wiley & Sons, New York (1985)). These allelic variants can vary at either the polynucleotide and/or polypeptide level and are included in the present disclosure. Alternatively, non-naturally occurring variants can be produced by mutagenesis techniques or by direct synthesis.

[0126] Using known methods of protein engineering and recombinant DNA technology, variants can be generated to improve or alter the characteristics of the polypeptides. For instance, one or more amino acids can be deleted from the N-terminus or C-terminus of the secreted protein without substantial loss of biological function. Ron et al., J. Biol. Chem. 268:2984-2988 (1993), incorporated herein by reference in its entirety, reported variant KGF proteins having heparin binding activity even after deleting 3, 8, or 27 amino-terminal amino acid residues. Similarly, interferon gamma exhibited up to ten times higher activity after deleting 8-10 amino acid residues from the carboxy terminus of this protein. (Dobeli et al., J. Biotechnology 7:199-216 (1988), incorporated herein by reference in its entirety.)

[0127] Moreover, ample evidence demonstrates that variants often retain a biological activity similar to that of the naturally occurring protein. For example, Gayle and coworkers (J. Biol. Chem 268:22105-22111 (1993), incorporated herein by reference in its entirety) conducted extensive mutational analysis of human cytokine IL-1a. They used random mutagenesis to generate over 3,500 individual IL-1a mutants that averaged 2.5 amino acid changes per variant over the entire length of the molecule. Multiple mutations were examined at every possible amino acid position. The investigators found that “[m] ost of the molecule could be altered with little effect on either [binding or biological activity].” (See Abstract.) In fact, only 23 unique amino acid sequences, out of more than 3,500 nucleotide sequences examined, produced a protein that significantly differed in activity from wild-type.

[0128] As stated above, variants or derivatives include, e.g., modified polypeptides. In some aspects, variants or derivatives of, e.g., polypeptides, polynucleotides, lipids, glycoproteins, are the result of chemical modification and/or endogenous modification. In some aspects, variants or derivatives are the result of in vivo modification. In some aspects, variants or derivatives are the result of in vitro modification. In yet other aspects, variant or derivatives are the result of intracellular modification in producer cells.

[0129] Modifications present in variants and derivatives include, e.g., acetylation, acylation, adenosine diphosphate ribose (ADP) ribosylation, amidation, covalent attachment of flavin, covalent attachment of a heme moiety, covalent attachment of a nucleotide or nucleotide derivative, covalent attachment of a lipid or lipid derivative, covalent attachment of phosphotidylinositol, cross-linking, cyclization, disulfide bond formation, demethylation, formation of covalent cross-links, formation of cysteine, formation of pyroglutamate, formylation, gamma-carboxylation, glycosylation, GPI anchor formation, hydroxylation, iodination, methylation, myristoylation, oxidation, pegylation (Mei et al., Blood 116:270-79 (2010), which is incorporated herein by reference in its entirety), proteolytic processing, phosphorylation, prenylation, racemization, selenoylation, sulfation, transfer-RNA mediated addition of amino acids to proteins such as arginylation, and ubiquitination.

[0130] In some aspects, Scaffold X can be modified at any convenient location. In some aspects, a biologically active molecule can be modified at any convenient location. In particular aspects of the present disclosure, an EV, e.g., exosome, component (e.g., a protein such as Scaffold X, a lipid, or a glycan) and/or a biologically active molecule (e.g., an antibody or ADC, a PROTAC, a small molecule such as a cyclic dinucleotide, a toxin such as MMAE, a STING (stimulator of interferon genes) agonist (e.g., CAS Nos. 702662-50-8 and 849214 Apr. 6), a tolerizing agent (e.g., agents disclosed in U.S. Pat. No. 7,910,113 and U.S. Patent Application Publication 2009/0169578), or an antisense oligonucleotide) can be modified to yield a derivative comprising at least one linker, spacer, or both a linker and a spacer, as disclosed herein.

[0131] The term “alkyl,” by itself or as part of another substituent, means, unless otherwise stated, a straight or branched chain hydrocarbon radical having the number of carbon atoms designated (e.g., C₁-C₁₀ means one to ten carbon atoms). Typically, an alkyl group will have from 1 to 15 carbon atoms, for example, having from 1 to 10 carbon atoms, from 1 to 8 carbon atoms or from 1 to 6 carbon atoms. A “lower alkyl” group is an alkyl group having from 1 to 4 carbon atom (e.g., 1 to 3 carbon atoms or 1 to 2 carbon atoms). The term “alkyl” includes mono-, di-, and multivalent radicals. For example, the term “alkyl” includes “alkylenyl” wherever appropriate, e.g., when the formula indicates that the alkyl group is divalent or when substituents are joined to form a ring. Examples of alkyl radicals include, but are not limited to, methyl, ethyl, n-propyl, isopropyl, n-butyl, tert-butyl, iso-butyl, sec-butyl, as well as homologs and isomers of, for example, n-pentyl, n-hexyl, n-heptyl and n-octyl.

[0132] The term “alkylenyl” by itself or as part of another substituent means a divalent (diradical) alkyl group, wherein alkyl is defined herein. “Alkylenyl” is exemplified, but not limited, by —CH₂CH₂CH₂CH₂—. Typically, an “alkylenyl” group will have from 1 to 15 carbon atoms, for example, having 10 or fewer carbon atoms (e.g., 1 to 8 or 1 to 6 carbon atoms). A “lower alkylenyl” group is an alkylene group having from 1 to 4 carbon atoms (e.g., 1 to 3 carbon atoms or 1 to 2 carbon atoms).

[0133] The term “alkenyl” by itself or as part of another substituent refers to a straight or branched chain hydrocarbon radical having from 2 to 15 carbon atoms and at least one double bond. A typical alkenyl group has from 2 to 10 carbon atoms and at least one double bond. In one aspect, alkenyl groups have from 2 to 8 carbon atoms or from 2 to 6 carbon atoms and from 1 to 3 double bonds. Exemplary alkenyl groups include vinyl, 2-propenyl, 1-but-3-enyl, crotyl, 2-(butadienyl), 2,4-pentadienyl, 3-(1,4-pentadienyl), 2-isopentenyl, 1-pent-3-enyl, 1-hex-5-enyl and the like.

[0134] The term “alkynyl” by itself or as part of another substituent refers to a straight or branched chain, unsaturated or polyunsaturated hydrocarbon radical having from 2 to 15 carbon atoms and at least one triple bond. A typical “alkynyl” group has from 2 to 10 carbon atoms and at least one triple bond. In one aspect of the disclosure, alkynyl groups have from 2 to 6 carbon atoms and at least one triple bond. Exemplary alkynyl groups include prop-1-ynyl, prop-2-ynyl (i.e., propargyl), ethynyl and 3-butynyl.

[0135] The terms “alkoxy,” “alkylamino,” and “alkylthio” (or thioalkoxy) are used in their conventional sense, and refer to alkyl groups that are attached to the remainder of the molecule via an oxygen atom, an amino group, or a sulfur atom, respectively.

[0136] The term “heteroalkyl,” by itself or in combination with another term, means a stable, straight or branched chain hydrocarbon radical consisting of the stated number of carbon atoms (e.g., C₂-C₁₀, or C₂-C₈) and at least one heteroatom chosen, e.g., from N, O, S, Si, B, and P (in one aspect, N, O, and S), wherein the nitrogen, sulfur and phosphorus atoms are optionally oxidized, and the nitrogen atom(s) are optionally quaternized. The heteroatom(s) is/are placed at any interior position of the heteroalkyl group. Examples of heteroalkyl groups include, but are not limited to, —CH₂—CH₂—O—CH₃, —CH₂—CH₂—NH—CH₃, —CH₂—CH₂—N(CH₃)—CH₃, —CH₃—S—CH₂—CH₃, —CH₂—CH₂—S(O)—CH₃, —CH₂—CH₂—S(O)₂—CH₃, —CH═CH—O—CH₃, —CH₂—Si (CH₃) 3, —CH₂—CH═N—OCH₃, and —CH═CH—N(CH₃)—CH₃. Up to two heteroatoms can be consecutive, such as, for example, —CH₂—NH—OCH₃ and —CH₂—O—Si (CH₃)₃.

[0137] Similarly, the term “heteroalkylenyl” by itself or as part of another substituent means a divalent radical derived from heteroalkyl, as exemplified, but not limited by, —CH₂—CH₂—S—CH₂—CH₂— and —CH₂—S—CH₂—CH₂—NH—CH₂—. Typically, a heteroalkyl group will have from 3 to 24 atoms (carbon and heteroatoms, excluding hydrogen)(3- to 24-membered heteroalkyl). In another example, the heteroalkyl group has a total of 3 to 10 atoms (3- to 10-membered heteroalkyl) or from 3 to 8 atoms (3- to 8-membered heteroalkyl). The term “heteroalkyl” includes “heteroalkylenyl” wherever appropriate, e.g., when the formula indicates that the heteroalkyl group is divalent or when substituents are joined to form a ring.

[0138] The term “C₁₋₈ alkyl” as used herein refers to a straight chain or branched, saturated hydrocarbon having from 1 to 8 (e.g., 1 to 7, 1 to 6, 1 to 5, 1 to 4, 1 to 3, or 1 to 2) carbon atoms. Representative “C₁₋₈ alkyl” groups include, but are not limited to, methyl, ethyl, n-propyl, n-butyl, n-pentyl, n-hexyl, n-heptyl, n-octyl, isopropyl, sec-butyl, isobutyl, tert-butyl, isopentyl, and 2-methylbutyl.

[0139] The term “C₁₋₁₀ alkylenyl” refers to a saturated, straight chain hydrocarbon group of the formula —(CH₂)₁₋₁₀—. Examples of C₁₋₁₀ alkylenyl include methylenyl, ethylenyl, propylenyl, butylenyl, pentylenyl, hexylenyl, heptylenyl, octylenyl, nonylenyl, and decalenyl.

[0140] The term “cycloalkyl” by itself or in combination with other terms, represents a saturated or unsaturated, non-aromatic carbocyclic radical having from 3 to 24 carbon atoms, for example, having from 3 to 12 carbon atoms (e.g., C₃-C₈ cycloalkyl or C₃-C₆ cycloalkyl). Examples of cycloalkyl include, but are not limited to, cyclopropyl, cyclobutyl, cyclopentyl, cyclopentadienyl, cyclohexyl, cyclohexenyl, 1,3-cyclohexadienyl, 1,4-cyclohexadienyl, cycloheptyl, 1,3-cycloheptadienyl, 1,3,5-cycloheptatrienyl, cyclooctyl, and cyclooctadienyl and the like. The term “cycloalkyl” also includes bridged, polycyclic (e.g., bicyclic) structures, such as norbornyl, adamantyl and bicyclo[2.2.1]heptyl. The “cycloalkyl” group can be fused to at least one (e.g., 1 to 3) other ring selected from aryl (e.g., phenyl), heteroaryl (e.g., pyridyl) and non-aromatic (e.g., carbocyclic or heterocyclic) rings. When the “cycloalkyl” group includes a fused aryl, heteroaryl or heterocyclic ring, then the “cycloalkyl” group is attached to the remainder of the molecule via the carbocyclic ring.

[0141] The term “heterocycloalkyl,” “heterocyclic,” “heterocycle,” or “heterocyclyl,” by itself or in combination with other terms, represents a carbocyclic, non-aromatic ring (e.g., 3- to 8-membered ring and for example, 4-, 5-, 6- or 7-membered ring) containing at least one and up to 5 heteroatoms selected from, e.g., N, O, S, Si, B, and P (in an aspect, N, O, and S), wherein the nitrogen, sulfur and phosphorus atoms are optionally oxidized, and the nitrogen atom(s) are optionally quaternized (e.g., from 1 to 4 heteroatoms selected from nitrogen, oxygen and sulfur), or a fused ring system of 4- to 8-membered rings, containing at least one and up to 10 heteroatoms (e.g., from 1 to 5 heteroatoms selected from N, O and S) in stable combinations known to those of skill in the art. Exemplary heterocycloalkyl groups include a fused phenyl ring. When the “heterocyclic” group includes a fused aryl, heteroaryl or cycloalkyl ring, then the “heterocyclic” group is attached to the remainder of the molecule via a heterocycle. A heteroatom can occupy the position at which the heterocycle is attached to the remainder of the molecule.

[0142] Exemplary heterocycloalkyl or heterocyclic groups of the present disclosure include morpholinyl, thiomorpholinyl, thiomorpholinyl S-oxide, thiomorpholinyl S,S-dioxide, piperazinyl, homopiperazinyl, pyrrolidinyl, pyrrolinyl, imidazolidinyl, tetrahydropyranyl, piperidinyl, tetrahydrofuranyl, tetrahydrothienyl, piperidinyl, homopiperidinyl, homomorpholinyl, homothiomorpholinyl, homothiomorpholinyl S,S-dioxide, oxazolidinonyl, dihydropyrazolyl, dihydropyrrolyl, dihydropyrazolyl, dihydropyridyl, dihydropyrimidinyl, dihydrofuryl, dihydropyranyl, tetrahydrothienyl S-oxide, tetrahydrothienyl S,S-dioxide, homothiomorpholinyl S-oxide, 1-(1,2,5,6-tetrahydropyridyl), 1-piperidinyl, 2-piperidinyl, 3-piperidinyl, 4-morpholinyl, 3-morpholinyl, tetrahydrofuran-2-yl, tetrahydrofuran-3-yl, tetrahydrothien-2-yl, tetrahydrothien-3-yl, 1-piperazinyl, 2-piperazinyl, and the like.

[0143] By “aryl” is meant a 5-, 6- or 7-membered, aromatic carbocyclic group having a single ring (e.g., phenyl) or being fused to other aromatic or non-aromatic rings (e.g., from 1 to 3 other rings). When the “aryl” group includes a non-aromatic ring (such as in 1,2,3,4-tetrahydronaphthyl) or heteroaryl group then the “aryl” group is bonded to the remainder of the molecule via an aryl ring (e.g., a phenyl ring). The aryl group is optionally substituted (e.g., with 1 to 5 substituents described herein). In one example, the aryl group has from 6 to 10 carbon atoms. Non-limiting examples of aryl groups include phenyl, 1-naphthyl, 2-naphthyl, anthracenyl, quinoline, indanyl, indenyl, dihydronaphthyl, fluorenyl, tetralinyl, benzo[d][1,3]dioxolyl or 6,7,8,9-tetrahydro-5H-benzo[a] cycloheptenyl. In one aspects, the aryl group is selected from phenyl, benzo[d][1,3]dioxolyl and naphthyl. The aryl group, in yet another aspect, is phenyl.

[0144] The term “arylenyl” refers to an aryl group which has two open valencies bonds and can be in the ortho, meta, or para configurations as shown in the following structures:

[chemical structure]

in which the arylenyl group can be unsubstituted or substituted with up to four (e.g., 1, 2, 3, or 4) groups including, but not limited to, C₁₋₈ alkyl, —O—(C₁₋₈ alkyl), -aryl, —C(O)R′, —OC(O)R′, —C(O) OR′, —C(O)NH₂, —C(O)NHR′, —C(O)N(R′)₂—, —NHC(O)R′, —S(O)₂R′, —S(O)R′, —OH, -halo, —N₃, —NH₂, —NH(R′), —N(R′)₂—NO₂, and —CN, wherein each R′ is independently H, —C₁₋₈ alkyl, or aryl.

[0145] The term “arylalkyl” or “aralkyl” is meant to include those radicals in which an aryl group or heteroaryl group is attached to an alkyl group to create the radicals-alkyl-aryl and -alkyl-heteroaryl, wherein alkyl, aryl and heteroaryl are defined herein. Exemplary “arylalkyl” or “aralkyl” groups include benzyl, phenethyl, pyridylmethyl and the like.

[0146] By “aryloxy” is meant the group-O-aryl, where aryl is as defined herein. In one example, the aryl portion of the aryloxy group is phenyl or naphthyl. The aryl portion of the aryloxy group, in one aspect, is phenyl.

[0147] The term “heteroaryl” or “heteroaromatic” refers to a polyunsaturated, 5-, 6- or 7-membered aromatic moiety containing at least one heteroatom (e.g., 1 to 5 heteroatoms, such as 1-3 heteroatoms) selected from N, O, S, Si, and B (in an aspect, N, O, and S), wherein the nitrogen and sulfur atoms are optionally oxidized, and the nitrogen atom(s) are optionally quaternized. The “heteroaryl” group can be a single ring or be fused to other aryl, heteroaryl, cycloalkyl or heterocycloalkyl rings (e.g., from 1 to 3 other rings). When the “heteroaryl” group includes a fused aryl, cycloalkyl or heterocycloalkyl ring, then the “heteroaryl” group is attached to the remainder of the molecule via the heteroaryl ring. A heteroaryl group can be attached to the remainder of the molecule through a carbon- or heteroatom.

[0148] In one example, the heteroaryl group has from 4 to 10 carbon atoms and from 1 to 5 heteroatoms selected from O, S and N. Non-limiting examples of heteroaryl groups include pyridyl, pyrimidinyl, quinolinyl, benzothienyl, indolyl, indolinyl, pyridazinyl, pyrazinyl, isoindolyl, isoquinolyl, quinazolinyl, quinoxalinyl, phthalazinyl, imidazolyl, isoxazolyl, pyrazolyl, oxazolyl, thiazolyl, indolizinyl, indazolyl, benzothiazolyl, benzimidazolyl, benzofuranyl, furanyl, thienyl, pyrrolyl, oxadiazolyl, thiadiazolyl, triazolyl, tetrazolyl, isothiazolyl, naphthyridinyl, isochromanyl, chromanyl, tetrahydroisoquinolinyl, isoindolinyl, isobenzotetrahydrofuranyl, isobenzotetrahydrothienyl, isobenzothienyl, benzoxazolyl, pyridopyridyl, benzotetrahydrofuranyl, benzotetrahydrothienyl, purinyl, benzodioxolyl, triazinyl, pteridinyl, benzothiazolyl, imidazopyridyl, imidazothiazolyl, dihydrobenzisoxazinyl, benzisoxazinyl, benzoxazinyl, dihydrobenzisothiazinyl, benzopyranyl, benzothiopyranyl, chromonyl, chromanonyl, pyridyl-N-oxide, tetrahydroquinolinyl, dihydroquinolinyl, dihydroquinolinonyl, dihydroisoquinolinonyl, dihydrocoumarinyl, dihydroisocoumarinyl, isoindolinonyl, benzodioxanyl, benzoxazolinonyl, pyrrolyl N-oxide, pyrimidinyl N-oxide, pyridazinyl N-oxide, pyrazinyl N-oxide, quinolinyl N—oxide, indolyl N-oxide, indolinyl N-oxide, isoquinolyl N-oxide, quinazolinyl N-oxide, quinoxalinyl N-oxide, phthalazinyl N-oxide, imidazolyl N-oxide, isoxazolyl N-oxide, oxazolyl N-oxide, thiazolyl N-oxide, indolizinyl N-oxide, indazolyl N-oxide, benzothiazolyl N-oxide, benzimidazolyl N-oxide, pyrrolyl N-oxide, oxadiazolyl N-oxide, thiadiazolyl N-oxide, triazolyl N-oxide, tetrazolyl N-oxide, benzothiopyranyl S-oxide, benzothiopyranyl S,S-dioxide. Exemplary heteroaryl groups include imidazolyl, pyrazolyl, thiadiazolyl, triazolyl, isoxazolyl, isothiazolyl, imidazolyl, thiazolyl, oxadiazolyl, and pyridyl. Other exemplary heteroaryl groups include 1-pyrrolyl, 2-pyrrolyl, 3-pyrrolyl, 3-pyrazolyl, 2-imidazolyl, 4-imidazolyl, pyrazinyl, 2-oxazolyl, 4-oxazolyl, 2-phenyl-4-oxazolyl, 5-oxazolyl, 3-isoxazolyl, 4-isoxazolyl, 5-isoxazolyl, 2-thiazolyl, 4-thiazolyl, 5-thiazolyl, 2-furyl, 3-furyl, 2-thienyl, 3-thienyl, 2-pyridyl, 3-pyridyl, pyridin-4-yl, 2-pyrimidyl, 4-pyrimidyl, 5-benzothiazolyl, purinyl, 2-benzimidazolyl, 5-indolyl, 1-isoquinolyl, 5-isoquinolyl, 2-quinoxalinyl, 5-quinoxalinyl, 3-quinolyl, and 6-quinolyl.

[0149] Any of the organic residues described herein (e.g., alkyl, alkenyl, alkynyl, cycloalkyl, heterocycloalkyl, aryl, heteroaryl, etc.) can be unsubstituted or substituted with one or more (e.g., 1, 2, 3, 4, 5, 6, or 7) groups, as appropriate. Typical substituents include, but is not limited to, C₁₋₈ alkyl, —O—(C₁₋₈ alkyl), -aryl, —C(O)R′, —OC(O)R′, —C(O) OR′, —C(O)NH₂, —C(O)NHR′, —C(O)N(R′)₂—, —NHC(O)R′, —S(O) 2R′, —S(O)R′, —OH, -halo, —N₃, —NH₂, —NH (R′), —N(R′)₂ and —CN, wherein each R′ is independently H, —C₁₋₈ alkyl, or aryl.

### Extracellular Vesicles Comprising the Construct of Formula I

[0150] The present disclosure provides extracellular vesicle (EV) comprising a biologically active molecule (BAM) attached to the EV via an anchoring moiety (AM) according to Formula I or II:

[chemical structure]

[0151] wherein
[0152] L₁, L₂, and L₃ are the same or different and each is an optional cleavable linkage; and SP₁, SP₂, SP₃, and SP₄ are optional first, second, third, and fourth spacers, respectively, wherein at least one of L₁, L₂, and L₃ is present and comprises a cell penetrating peptide.

[0153] As used herein the term “linker” refers to a combination of structural elements comprising, e.g., “linkages” (both cleavable and non-cleavable) and “spacers,” which connect an anchoring moiety AM and a biological active molecule BAM. These linkers allow loading biological active molecules (e.g., ASOs) more efficiently and in larger numbers onto the surface of EVs (e.g., exosomes) than a corresponding construct comprising the same anchoring moiety (AM) and biologically active molecule (BAM) in the absence of the cleavable linkage of the present disclosure. In other words, the constructs disclosed herein, e.g., a construct of Formula I or II, results in (i) higher EV loading efficiency, (ii) higher number of BAM per EV, (iii) higher density of BAM per EV, (iv) higher BAM potency, or (v) any combination thereof, with respect to a construct with the architecture AM-BAM or AM-SPI-BAM.

[0154] As used herein, the term “linkage” refers to any bond or chemical group connecting, e.g., an anchoring moiety AM and a spacer SP, a spacer SP and a biologically active molecule BAM, or an anchoring moiety AM and a biologically active molecule BAM. In constructs where more than an anchoring moiety AM or biologically active molecule BAM is present, a linkage can connect two anchoring moieties or two biologically active moieties. In some aspects, a “linkage” can be a bond that is cleavable, non-cleavable, or both cleavable and non-cleavable. In some aspects, a linkage can comprise multiple linkers and bonds, which can respond to different stimuli such as pH, temperature, enzymes, etc.

[0155] The term “spacer” as used herein refers to a chemical moiety which is capable of covalently linking together two spaced moieties (e.g., a biologically active molecule and an anchoring moiety) into a normally stable dipartate molecule. Generally, spacers as not cleavable. For example, a spacer can be an alkyl chain or a polyalkyloxy chain, as described herein.

[0156] In some aspects, the length of the linker connecting an anchoring moiety AM and a biologically active molecule BAM is between about 2 nm and about 30 nm. In some aspects, the length of the linker connecting an anchoring moiety AM and a biologically active molecule BAM is about 2 nm, about 3 nm, about 4 nm, about 5 nm, about 6 nm, about 7 nm, about 8 nm, about 9 nm, about 10 nm, about 11 nm, about 12 nm, about 13 nm, about 14 nm, about 15 nm, about 16 nm, about 17 nm, about 18 nm, about 19 nm, about 20 nm, about 21 nm, about 22 nm, about 23 nm, about 24 nm, about 25 nm, about 26 nm, about 27 nm, about 28 nm, about 29 nm, or about 30 nm. In some aspects, the length of the optimized linker is at least 2 nm, at least 3 nm, at least 4 nm, at least 5 nm, at least 6 nm, at least 7 nm, at least 8 nm, at least 9 nm, at least 10 nm, at least 11 nm, at least 12 nm, at least 13 nm, at least 14 nm, at least 15 nm, at least 16 nm, at least 17 nm, at least 18 nm, at least 19 nm, at least 20 nm, at least 21 nm, at least 22 nm, at least 23 nm, at least 24 nm, at least 25 nm, at least 26 nm, at least 27 nm, at least 28 nm, at least 29 nm, or at least 30 nm. In some aspects, the length of the optimized linker is less than about 2 nm, less than about 3 nm, less than about 4 nm, less than about 5 nm, less than about 6 nm, less than about 7 nm, less than about 8 nm, less than about 9 nm, less than about 10 nm, less than about 11 nm, less than about 12 nm, less than about 13 nm, less than about 14 nm, less than about 15 nm, less than about 16 nm, less than about 17 nm, less than about 18 nm, less than about 19 nm, less than about 20 nm, less than about 21 nm, less than about 22 nm, less than about 23 nm, less than about 24 nm, less than about 25 nm, less than about 26 nm, less than about 27 nm, less than about 28 nm, less than about 29 nm, or less than about 30 nm.

[0157] In some aspects, the length of the linker connecting an anchoring moiety AM and a biologically active molecule BAM is about 2 nm to about 4 nm, about 3 nm to about 5 nm, about 4 nm to about 6 nm, about 5 nm to about 7 nm, about 6 nm to about 8 nm, about 7 nm to about 9 nm, about 8 nm to about 10 nm, about 9 nm to about 11 nm, about 10 nm to about 12 nm, about 11 nm to about 13 nm, about 12 nm to about 14 nm, about 13 nm to about 15 nm, about 14 nm to about 16 nm, about 15 nm to about 17 nm, about 16 nm to about 18 nm, about 17 nm to about 19 nm, about 18 nm to about 20 nm, about 19 nm to about 21 nm, about 20 nm to about 22 nm, about 21 nm to about 23 nm, about 22 nm to about 24 nm, about 23 nm to about 25 nm, about 24 nm to about 26 nm, about 25 nm to about 27 nm, about 26 nm to about 28 nm, about 27 nm to about 29 nm, about 28 nm to about 30 nm, about 2 nm to about 6 nm, about 4 nm to about 8 nm, about 6 nm to about 10 nm, about 8 nm to about 12 nm, about 10 nm to about 14 nm, about 12 nm to about 16 nm, about 14 nm to about 18 nm, about 16 nm to about 20 nm to about, about 18 nm to about 22 nm, about 20 nm to about 24 nm, about 22 nm to about 26 nm, about 24 nm to about 28 nm, about 26 nm to about 30 nm, about 2 nm to about 10 nm, about 4 nm to about 12 nm, about 6 nm to about 14 nm, about 8 nm to about 16 nm, about 10 nm to about 18 nm, about 12 nm to about 20 nm, about 14 nm to about 22 nm, about 16 nm to about 24 nm, about 18 nm to about 26 nm, about 20 nm to about 28 nm, about 22 nm to about 30 nm, about 2 nm to about 12 nm, about 4 nm to about 14 nm, about 6 nm to about 16 nm, about 8 nm to about 18 nm, about 10 nm to about 20 nm, about 12 nm to about 22 nm, about 14 nm to about 24 nm, about 16 nm to about 26 nm, about 18 nm to about 28 nm, about 20 nm to about 30 nm, about 2 nm to about 5 nm, about 5 nm to about 10 nm, about 10 nm to about 15 nm, about 15 nm to about 20 nm, about 20 nm to about 25 nm, or about 25 nm to about 30 nm.

### Extracellular Vesicles

[0158] Extracellular vesicles (EVs) typically have a diameter or 20 nm to 1000 nm. Exosomes, which are small extracellular vesicles, typically are about 50-200 nm (e.g., 100-200 nm) in diameter. EVs, e.g., exosomes, are composed of a limiting lipid bilayer and a diverse set of proteins and nucleic acids (Maas, S. L. N., et al., Trends. Cell Biol. 27 (3): 172-188 (2017)). EVs, e.g., exosomes, exhibit preferential uptake in discrete cell types and tissues, and their tropism can be directed by adding proteins to their surface that interact with receptors on the surface of target cells (Alvarez-Erviti, L., et al., Nat. Biotechnol. 29 (4): 341-345 (2011)).

[0159] The EVs (e.g., exosomes) of the present disclosure can have a diameter between about 20 and about 300 nm. In certain aspects, an EV (e.g., exosome) of the present disclosure has a diameter between about 20 to about 290 nm, about 20 to about 280 nm, about 20 to about 270 nm, about 20 to about 260 nm, about 20 to about 250 nm, about 20 to about 240 nm, about 20 to about 230 nm, about 20 to about 220 nm, about 20 to about 210 nm, about 20 to about 200 nm, about 20 to about 190 nm, about 20 to about 180 nm, about 20 to about 170 nm, about 20 to about 160 nm, about 20 to about 150 nm, about 20 to about 140 nm, about 20 to about 130 nm, about 20 to about 120 nm, about 20 to about 110 nm, about 20 to about 100 nm, about 20 to about 90 nm, about 20 to about 80 nm, about 20 to about 70 nm, about 20 to about 60 nm, about 20 to about 50 nm, about 20 to about 40 nm, or about 20 to about 30 nm. The size of the EV (e.g., exosome) described herein can be measured according to methods known in the art.

[0160] Unlike antibodies, EVs (e.g., exosomes) can accommodate large numbers of molecules attached to their surface, on the order of thousands to tens of thousands of molecules per EV (e.g., exosome). EV (e.g., exosome)-drug conjugates thus represent a platform to deliver a high concentration of therapeutic compounds to discrete cell types, while at the same time limiting overall systemic exposure to the compound, which in turn, reduces off-target toxicity. The accommodation of larger numbers of molecules on the surface of EVs (e.g., exosomes) can be influenced, for example, by the type of biologically active molecule used (e.g., an antibody is bulkier than an antisense oligonucleotide), the type of membrane anchor used (e.g., a protein anchor is bulkier than a lipid or lipid plus spacer anchor), and the combinations of linkers and spacers connecting the biologically active molecule and the membrane anchor. In this respect, the present disclosure provides specific combinations of linkers and spacers connecting a biologically active molecule (e.g., an ASO) and a membrane anchor (e.g., a lipid), wherein the membrane anchor attaches the biologically active molecule to the surface of an EV (e.g., exosome).

[0161] In some aspects, the present disclosure provides a “biologically active molecule” (BAM), e.g., an ASO, attached (e.g., covalently bonded) to one or more anchoring moieties (AM) either directly or indirectly, e.g., via one or more linker combinations. The anchoring moiety can insert into the lipid bilayer of an EV, e.g., an exosome, allowing the loading of the exosome with a BAM, e.g., an ASO. Currently, a predominant obstacle to the commercialization of exosomes as a delivery vehicle for polar BAMs, e.g., ASOs, is highly inefficient loading. As shown herein, this obstacle can be overcome by using specific linkers/spacer combinations (i.e., “linkers”) connecting the BAM to the AM prior to loading them into EVs, e.g., exosomes. Thus, as described herein, the use of optimized linkers facilitates the loading of BAMs, e.g., ASOs, onto EVs, e.g., exosomes.

[0162] The composition and methods of loading EVs (e.g., exosomes) with constructs comprising BAMs, e.g., ASOs, connected to AMs (e.g., lipids, such as sterols) via optimized linkers set forth herein improve loading efficiency and BAM density as compared to the loading efficiency and BAM density previously reported for introducing unmodified BAMs into EVs (e.g., exosomes) by, for example, electroporation or cationic lipid transfection. The compositions and methods disclosed herein also significantly improve the potency of EVs (e.g., exosomes) compared to the potencies previously reported when unmodified BAMs are introduced into EVs (e.g., exosomes) by, for example, electroporation or cationic lipid transfection.

[0163] EVs (e.g., exosomes) of the present disclosure comprise a bi-lipid membrane (“exosome membrane” or “EV membrane”), comprising an interior surface (luminal surface) and an exterior surface. The interior surface faces the inner core of the EV (e.g., exosome), i.e., the lumen of the EV. The EV or exosome membrane comprises lipids and fatty acids. Exemplary lipids comprise phospholipids, glycolipids, fatty acids, sphingolipids, phosphoglycerides, sterols, cholesterols, and phosphatidylserines. The EV or exosome membrane comprises an inner leaflet and an outer leaflet. The composition of the inner and outer leaflet can be determined by transbilayer distribution assays known in the art, see, e.g., Kuypers et al., Biohim Biophys Acta 1985 819:170.

[0164] In some aspects, the composition of the outer leaflet is between about 70% and about 90% choline phospholipids, between about 0% and about 15% acidic phospholipids, and between about 5% and about 30% phosphatidylethanolamine. In some aspects, the composition of the inner leaflet is between about 15% and about 40% choline phospholipids, between about 10% and about 50% acidic phospholipids, and between about 30% and about 60% phosphatidylethanolamine. In some aspects, the EV or exosome membrane comprises one or more polysaccharides, such as glycan. Glycans on the surface of the EV or exosomes can serve as an attachment to a maleimide moiety or a linker that connect the glycan and a maleimide moiety. The glycan can be present on one or more proteins on the surface of an EV (e.g., exosome), for example, a Scaffold X, such as a PTGFRN polypeptide, or on the lipid membrane of the EV (e.g., exosome). Glycans can be modified to have thiofucose that can serve as a functional group for attaching a maleimide moiety to the glycans. In some aspects, the Scaffold X can be modified to express a high number of glycan to allow additional attachments on the EV (e.g., exosome).

### Anchoring Moiety

[0165] In some aspects, the anchoring moiety AM of Formula I of II comprises a sterol, a lipid (e.g., a phospholipid), a vitamin, a peptide, or a combination thereof and optionally spacer. In general, the AM can comprise any hydrophobic moiety or combination thereof capable of inserting into the lipid bilayer of the EV (e.g., exosome), interacting electrostatically with the surface of the EV (e.g., exosome), or a combination thereof. Suitable anchoring moieties AM capable of anchoring a biologically active molecule BAM to the surface of an EV, e.g., an exosome, comprise for example sterols (e.g., cholesterol), lipids, phospholipids, lysophospholipids, fatty acids, a vitamin (e.g., fat-soluble vitamins, scaffolding moieties (e.g., Protein X), or combinations thereof as described herein.

[0166] In some aspects, the anchoring moiety AM comprises a sterol, steroid, hopanoid, hydroxysteroid, secosteroid, or analog thereof with lipophilic properties. In some aspects, the anchoring moiety comprises a sterol, such as a phytosterol, mycosterol, or zoosterol. Exemplary zoosterols include cholesterol and 24S-hydroxycholesterol; exemplary phytosterols include ergosterol (mycosterol), campesterol, sitosterol, and stigmasterol. In some aspects, the sterol is selected from ergosterol, 7-dehydrocholesterol, cholesterol, 24S-hydroxycholesterol, lanosterol, cycloartenol, fucosterol, saringosterol, campesterol, β-sitosterol, sitostanol, coprostanol, avenasterol, stigmasterol, or combinations thereof. Sterols can be found either as free sterols, acylated (sterol esters), alkylated (steryl alkyl ethers), sulfated (sterol sulfate), or linked to a glycoside moiety (steryl glycosides), which can be itself acylated (acylated sterol glycosides).

[0167] Sterols can be attached (via solid phase synthesis or conjugation), e.g., to a spacer SP via the available —OH group of the sterol. Exemplary sterols have the general skeleton shown below:

[chemical structure]

[0168] For example, ergosterol has the structure below:

[chemical structure]

[0169] In another example, cholesterol has the structure below:

[chemical structure]

[0170] In some aspects, the anchoring moiety AM comprises, consists, or consists essentially of a sterol, cholesterol, thiocholesterol, ergosterol, 7-dehydrocholesterol, 24S-hydroxycholesterol, lanosterol, cycloartenol, fucosterol, saringosterol, campesterol, β-sitosterol, sitostanol, coprostanol, avenasterol, stigmasterol, or combinations thereof. In some specific aspects, the anchoring moiety AM comprises cholesterol.

[0171] In some aspects, the anchoring moiety AM comprises a steroid. In some aspects, the steroid is selected from dihydrotestosterone, uvaol, hecigenin, diosgenin, progesterone, or cortisol.

[0172] In some aspects, the anchoring moiety AM comprises or consists of a lipid. A lipid anchoring moiety AM can comprise any lipid known in the art, e.g., palmitic acid or glycosylphosphatidylinositols. In some aspects, the AM comprises a lipid comprising a fatty acid or a phospholipid. In some aspects, the lipid is a fatty acid, phosphatide, phospholipid (e.g., phosphatidyl choline, phosphatidyl serine, or phosphatidyl ethanolamine), or analogue thereof (e.g., phosphatidylcholine, lecithin, phosphatidylethanolamine, cephalin, or phosphatidylserine or analogue or portion thereof, such as a partially hydrolyzed portion thereof).

[0173] In some aspects, the anchoring moiety AM comprises, consists, or consists essentially of a fatty acid, e.g., a straight chain fatty acid. In some aspects, the fatty acid is a straight chain fatty acid, a branched fatty acid, a saturated fatty acid, an unsaturated fatty acid, a hydroxyl fatty acid, a polycarboxylic acid, or any combination thereof. In some aspects, the fatty acid is a short-chain, medium-chain, or long-chain fatty acid. In some aspects, the fatty acid is a saturated fatty acid. In some aspects, the fatty acid is an unsaturated fatty acid. In some aspects, the fatty acid is a monounsaturated fatty acid. In some aspects, the fatty acid is a polyunsaturated fatty acid, such as an ω-3 (omega-3) or ω-6 (omega-6) fatty acid. In some aspects, the anchoring moiety AM comprises, consists, or consists essentially of a straight chain fatty, a branched fatty acid, an unsaturated fatty acid, a monounsaturated fatty acid, a polyunsaturated fatty acid, a hydroxyl fatty acid, a polycarboxylic acid, or any combination thereof.

[0174] In some aspects, the lipid, e.g., fatty acid, has a C₂-C₁₈ chain. In some aspects, the lipid, e.g., fatty acid, has a C₂, C₃, C₄, C₅, C₆, C₇, C₈, C₉, C₁₀, C₁₁, C₁₂, C₁₃, C₁₄, C₁₅, C₁₆, C₁₇, or C₁₈ chain. In some aspects, the fatty acid, has a C₂ chain. In some aspects, the fatty acid, has a C₃ chain. In some aspects, the fatty acid, has a C₄ chain. In some aspects, the fatty acid, has a C₅ chain. In some aspects, the fatty acid, has a C₆ chain. In some aspects, the fatty acid, has a C₇ chain. In some aspects, the fatty acid, has a C₈ chain. In some aspects, the fatty acid, has a C₉ chain. In some aspects, the fatty acid, has a C₁₀ chain. In some aspects, the fatty acid, has a C₁₁ chain. In some aspects, the fatty acid, has a C₁₂ chain. In some aspects, the fatty acid, has a C₁₃ chain. In some aspects, the fatty acid, has a C₁₄ chain. In some aspects, the fatty acid, has a C₁₅ chain. In some aspects, the fatty acid, has a C₁₆ chain. In some aspects, the fatty acid, has a C₁₇ chain. In some aspects, the fatty acid, has a C₁₈ chain.

[0175] In some aspects, the fatty acid, has a C₄-C₁₈ chain. In some aspects, the fatty acid, has a C₂-C₃, C₂-C₄, C₂-C₅, C₂-C₆, C₂-C₇, C₂-C₈, C₂-C₉, C₂-C₁₀, C₂-C₁₁, C₂-C₁₂, C₂-C₁₃, C₂-C₁₄, C₂-C₁₅, C₂-C₁₆, C₂-C₁₇, C₂-C₁₈, C₃-C₄, C₃-C₅, C₃-C₆, C₃-C₇, C₃-C₈, C₃-C₉, C₃-C₁₀, C₃-C₁₁, C₃-C₁₂, C₃-C₁₃, C₃-C₁₄, C₃-C₁₅, C₃-C₁₆, C₃-C₁₇, C₃-C₁₈, C₄-C₅, C₄-C₆, C₄-C₇, C₄- C₈, C₄-C₉, C₄-C₁₀, C₄-C₁₁, C₄-C₁₂, C₄-C₁₃, C₄-C₁₄, C₄-C₁₅, C₄-C₁₆, C₄-C₁₇, C₄-C₁₈, C₅-C₆, C₅-C₇, C₅- C₈, C₅-C₉, C₅-C₁₀, C₅-C₁₁, C₅-C₁₂, C₅-C₁₃, C₅-C₁₄, C₅-C₁₅, C₅-C₁₆, C₅-C₁₇, C₅-C₁₈, C₆-C₇, C₆-C₈, C₆- C₉, C₆-C₁₀, C₆-C₁₁, C₆-C₁₂, C₆-C₁₃, C₆-C₁₄, C₆-C₁₅, C₆-C₁₆, C₆-C₁₇, C₆-C₁₈, C₇-C₈, C₇-C₉, C₇-C₁₀, C₇- C₁₁, C₇-C₁₂, C₇-C₁₃, C₇-C₁₄, C₇-C₁₅, C₇-C₁₆, C₇-C₁₇, C₇-C₁₈, C₈-C₉, C₈-C₁₀, C₈-C₁₁, C₈-C₁₂, C₈-C₁₃, C₈-C₁₄, C₈-C₁₅, C₈-C₁₆, C₈-C₁₇, C₈-C₁₈, C₉-C₁₀, C₉-C₁₁, C₉-C₁₂, C₉-C₁₃, C₉-C₁₄, C₉-C₁₅, C₉-C₁₆, C₉-C₁₇, C₉-C₁₈, C₁₀-C₁₁, C₁₀-C₁₂, C₁₀-C₁₃, C₁₀-C₁₄, C₁₀-C₁₅, C₁₀-C₁₆, C₁₀-C₁₇, C₁₀-C₁₈, C₁₁-C₁₂, C₁₁-C₁₃, C₁₁-C₁₄, C₁₁-C₁₅, C₁₁-C₁₆, C₁₁-C₁₇, C₁₁-C₁₈, C₁₂-C₁₃, C₁₂-C₁₄, C₁₂-C₁₅, C₁₂-C₁₆, C₁₂-C₁₇, C₁₂-C₁₈, C₁₃-C₁₄, C₁₃-C₁₅, C₁₃-C₁₆, C₁₃-C₁₇, C₁₃-C₁₈, C₁₄-C₁₅, C₁₄-C₁₆, C₁₄-C₁₇, C₁₄-C₁₈, C₁₅-C₁₆, C₁₅-C₁₇, C₁₅-C₁₈, C₁₆-C₁₇, C₁₆-C₁₈, or C₁₇-C₁₈ chain.

[0176] In some aspects, the anchoring moiety AM comprises two fatty acids, each of which is independently selected from a fatty acid having a chain with any one of the foregoing ranges or numbers of carbon atoms. In some aspects, one of the fatty acids is independently a fatty acid with a C₂-C₃, C₂-C₄, C₂-C₅, C₂-C₆, C₂-C₇, C₂-C₈, C₂-C₉, C₂-C₁₀, C₂-C₁₁, C₂-C₁₂, C₂-C₁₃, C₂-C₁₄, C₂-C₁₅, C₂-C₁₆, C₂-C₁₇, C₂-C₁₈, C₃-C₄, C₃-C₅, C₃-C₆, C₃-C₇, C₃-C₈, C₃-C₉, C₃-C₁₀, C₃-C₁₁, C₃-C₁₂, C₃-C₁₃, C₃-C₁₄, C₃-C₁₅, C₃-C₁₆, C₃-C₁₇, C₃-C₁₈, C₄-C₅, C₄-C₆, C₄-C₇, C₄-C₈, C₄-C₉, C₄-C₁₀, C₄-C₁₁, C₄-C₁₂, C₄-C₁₃, C₄-C₁₄, C₄-C₁₅, C₄-C₁₆, C₄-C₁₇, C₄-C₁₈, C₅-C₆, C₅-C₇, C₅-C₈, C₅-C₉, C₅-C₁₀, C₅-C₁₁, C₅-C₁₂, C₅-C₁₃, C₅-C₁₄, C₅-C₁₅, C₅-C₁₆, C₅-C₁₇, C₅-C₁₈, C₆-C₇, C₆-C₉, C₆-C₉, C₆-C₁₀, C₆-C₁₁, C₆-C₁₂, C₆-C₁₃, C₆-C₁₄, C₆-C₁₅, C₆-C₁₆, C₆-C₁₇, C₆-C₁₈, C₇-C₈, C₇-C₉, C₇-C₁₀, C₇- C₁₁, C₇-C₁₂, C₇-C₁₃, C₇-C₁₄, C₇-C₁₅, C₇-C₁₆, C₇-C₁₇, C₇-C₁₈, C₈-C₉, C₈-C₁₀, C₈-C₁₁, C₈-C₁₂, C₈-C₁₃, C₈-C₁₄, C₈-C₁₅, C₈-C₁₆, C₈-C₁₇, C₈-C₁₈, C₉-C₁₀, C₉-C₁₁, C₉-C₁₂, C₉-C₁₃, C₉-C₁₄, C₉-C₁₅, C₉-C₁₆, C₉-C₁₇, C₉-C₁₈, C₁₀-C₁₁, C₁₀-C₁₂, C₁₀-C₁₃, C₁₀-C₁₄, C₁₀-C₁₅, C₁₀-C₁₆, C₁₀-C₁₇, C₁₀-C₁₈, C₁₁-C₁₂, C₁₁-C₁₃, C₁₁-C₁₄, C₁₁-C₁₅, C₁₁-C₁₆, C₁₁-C₁₇, C₁₁-C₁₈, C₁₂-C₁₃, C₁₂-C₁₄, C₁₂-C₁₅, C₁₂-C₁₆, C₁₂-C₁₇, C₁₂-C₁₈, C₁₃-C₁₄, C₁₃-C₁₅, C₁₃-C₁₆, C₁₃-C₁₇, C₁₃-C₁₈, C₁₄-C₁₅, C₁₄-C₁₆, C₁₄-C₁₇, C₁₄-C₁₈, C₁₅-C₁₆, C₁₅-C₁₇, C₁₅-C₁₈, C₁₆-C₁₇, C₁₆-C₁₈, or C₁₇-C₁₈ chain and the other one is independently a fatty acid with a C₂-C₃, C₂-C₄, C₂-C₅, C₂-C₆, C₂-C₇, C₂-C₈, C₂-C₉, C₂-C₁₀, C₂-C₁₁, C₂-C₁₂, C₂-C₁₃, C₂-C₁₄, C₂-C₁₅, C₂-C₁₆, C₂-C₁₇, C₂-C₁₈, C₃-C₄, C₃-C₅, C₃-C₆, C₃-C₇, C₃-C₈, C₃-C₉, C₃-C₁₀, C₃-C₁₁, C₃-C₁₂, C₃-C₁₃, C₃-C₁₄, C₃-C₁₅, C₃-C₁₆, C₃-C₁₇, C₃-C₁₈, C₄-C₅, C₄-C₆, C₄-C₇, C₄-C₈, C₄-C₉, C₄-C₁₀, C₄-C₁₁, C₄-C₁₂, C₄-C₁₃, C₄-C₁₄, C₄-C₁₅, C₄-C₁₆, C₄-C₁₇, C₄-C₁₈, C₅-C₆, C₅-C₇, C₅-C₈, C₅-C₉, C₅-C₁₀, C₅- C₁₁, C₅-C₁₂, C₅-C₁₃, C₅-C₁₄, C₅-C₁₅, C₅-C₁₆, C₅-C₁₇, C₅-C₁₈, C₆-C₇, C₆-C₈, C₆-C₉, C₆-C₁₀, C₆-C₁₁, C₆- C₁₂, C₆-C₁₃, C₆-C₁₄, C₆-C₁₅, C₆-C₁₆, C₆-C₁₇, C₆-C₁₈, C₇-C₈, C₇-C₉, C₇-C₁₀, C₇-C₁₁, C₇-C₁₂, C₇-C₁₃, C₇- C₁₄, C₇-C₁₅, C₇-C₁₆, C₇-C₁₇, C₇-C₁₈, C₈-C₉, C₈-C₁₀, C₈-C₁₁, C₈-C₁₂, C₈-C₁₃, C₈-C₁₄, C₈-C₁₅, C₈-C₁₆, C₈-C₁₇, C₈-C₁₈, C₉-C₁₀, C₉-C₁₁, C₉-C₁₂, C₉-C₁₃, C₉-C₁₄, C₉-C₁₅, C₉-C₁₆, C₉-C₁₇, C₉-C₁₈, C₁₀-C₁₁, C₁₀-C₁₂, C₁₀-C₁₃, C₁₀-C₁₄, C₁₀-C₁₅, C₁₀-C₁₆, C₁₀-C₁₇, C₁₀-C₁₈, C₁₁-C₁₂, C₁₁-C₁₃, C₁₁-C₁₄, C₁₁-C₁₅, C₁₁-C₁₆, C₁₁-C₁₇, C₁₁-C₁₈, C₁₂-C₁₃, C₁₂-C₁₄, C₁₂-C₁₅, C₁₂-C₁₆, C₁₂-C₁₇, C₁₂-C₁₈, C₁₃-C₁₄, C₁₃-C₁₅, C₁₃-C₁₆, C₁₃-C₁₇, C₁₃-C₁₈, C₁₄-C₁₅, C₁₄-C₁₆, C₁₄-C₁₇, C₁₄-C₁₈, C₁₅-C₁₆, C₁₅-C₁₇, C₁₅-C₁₈, C₁₆-C₁₇, C₁₆-C₁₈, or C₁₇-C₁₈ chain. In some aspects, each fatty acid independently has a chain of 2, 3, 4, 5, 6, 7, 8, 9, 10, 11, 12, 13, 14, 15, 16, 17 or 18 carbon atoms.

[0177] Examples of useful saturated straight-chain fatty acids include those having an even number of carbon atoms, such as butyric acid (C₄), caproic acid (C₆), caprylic acid (C₈), capric acid (C10), lauric acid (C12), myristic acid (C14), palmitic acid (C16), or stearic acid (C18), and those having an odd number of carbon atoms, such as propionic acid (C₃), n-valeric acid (C₅), enanthic acid (C₇), pelargonic acid (C₉), hendecanoic acid (C₁₁), tridecanoic acid (C₁₃), pentadecanoic acid (C₁₅), or heptadecanoic acid (C₁₇).

[0178] Examples of suitable saturated branched fatty acids include isobutyric acid, isocaproic acid, isocaprylic acid, isocapric acid, isolauric acid, 11-methyldodecanoic acid, isomyristic acid, 13-methyl-tetradecanoic acid, isopalmitic acid, 15-methyl-hexadecanoic acid, or isostearic acid. Suitable saturated odd-carbon branched fatty acids include anteiso fatty acids terminating with an isobutyl group, such as 6-methyl-octanoic acid, 8-methyl-decanoic acid, 10-methyl-dodecanoic acid, 12-methyl-tetradecanoic acid, or 14-methyl-hexadecanoic acid.

[0179] Examples of suitable unsaturated fatty acids include 4-decenoic acid, caproleic acid, 4-dodecenoic acid, 5-dodecenoic acid, lauroleic acid, 4-tetradecenoic acid, 5-tetradecenoic acid, 9-tetradecenoic acid, palmitoleic acid, 6-octadecenoic acid, oleic acid, and the like.

[0180] Examples of suitable hydroxy fatty acids include a-hydroxylauric acid, a-hydroxymyristic acid, α-hydroxypalmitic acid, α-hydroxystearic acid, ω-hydroxylauric acid, a-hydroxyarachic acid, 9-hydroxy-12-octadecenoic acid, ricinoleic acid, 9-hydroxy-trans-10,12-octadecadienic acid, 9,10-dihydroxystearic acid, 12-hydroxystearic acid and the like.

[0181] Examples of suitable polycarboxylic acids include oxalic acid, malonic acid, succinic acid, glutaric acid, adipic acid, pimelic acid, suberic acid, azelaic acid, sebacic acid, D,L-malic acid, and the like.

[0182] In some aspects, each fatty acid is independently selected from propionic acid, butyric acid, valeric acid, caproic acid, enanthic acid, caprylic acid, pelargonic acid, capric acid, undecylic acid, lauric acid, tridecylic acid, myristic acid, pentadecylic acid, palmitic acid, margaric acid, or stearic acid.

[0183] In some aspects, each fatty acid is independently selected from a-linolenic acid, stearidonic acid, eicosapentaenoic acid, docosahexaenoic acid, linoleic acid, gamma-linoleic acid, dihomo-gamma-linoleic acid, arachidonic acid, docosatetraenoic acid, palmitoleic acid, vaccenic acid, paullinic acid, oleic acid, elaidic acid, bosseopentaenoic acid, sardine acid, or another monounsaturated or polyunsaturated fatty acid.

[0184] In some aspects, one or both of the fatty acids is an essential fatty acid. In view of the beneficial health effects of certain essential fatty acids, the therapeutic benefits of disclosed therapeutic-loaded exosomes can be increased by including such fatty acids in the therapeutic agent. In some aspects, the essential fatty acid is an n-6 or n-3 essential fatty acid selected from the group consisting of linolenic acid, gamma-linolenic acid, dihomo-gamma-linolenic acid, arachidonic acid, adrenic acid, docosapentaenoic n-6 acid, alpha-linolenic acid, or stearidonic acid.

[0185] Fatty acid chains differ greatly in the length of their chains and can be categorized according to chain length, e.g., as short to very long. Short-chain fatty acids (SCFA) are fatty acids with chains of about five or less carbons (e.g., butyric acid). In some aspects, the fatty acid is a SCFA. Medium-chain fatty acids (MCFA) include fatty acids with chains of about 6-12 carbons, which can form medium-chain triglycerides. In some aspects, the fatty acid is a MCFA. Long-chain fatty acids (LCFA) include fatty acids with chains of 13-21 carbons. In some aspects, the fatty acid is a LCFA. In some aspects, the fatty acid is a LCFA.

[0186] In some aspects, the anchoring moiety AM is formed from a straight chain fatty that comprises, consists, or consists essentially of butyric acid, caproic acid, caprylic acid, capric acid, lauric acid, myristic acid, palmitic acid, stearic acid, or a combination thereof. In some specific aspects, the anchoring moiety AM is formed from palmitic acid.

[0187] In some aspects, the anchoring moiety AM comprises, consists, or consists essentially of a phospholipid. The structure of the phospholipid molecule generally consists of two hydrophobic fatty acid “tails” and a hydrophilic “head” consisting of a phosphate group. For example, a phospholipid can be a lipid according to the following formula:

[chemical structure]

in which R^{p} is a phospholipid moiety and R¹ and R² are the same or different and each is a fatty acid moiety with or without unsaturation. A fatty acid moiety can be selected, for example, from the non-limiting group consisting of lauric acid, myristic acid, myristoleic acid, palmitic acid, palmitoleic acid, stearic acid, oleic acid, or linoleic acid.

[0188] A phospholipid moiety can be, for example, a lecithin, a phosphatidyl choline (e.g., 2 lysophosphatidyl choline), a phosphoinositol, a phosphosphingolipid, a phosphoethanolamine, phosphatidyl ethanolamine, phosphatidyl glycerol, phosphatidyl serine, phosphatidic acid, and a sphingomyelin, or any combination thereof.

[0189] The phospholipids used as anchoring moieties AM in the present disclosure can be natural or non-natural phospholipids. Non-natural phospholipid species including natural species with modifications and substitutions including branching, oxidation, cyclization, and alkynes are also contemplated. For example, a phospholipid can be functionalized with or cross-linked to one or more alkynes (e.g., an alkenyl group in which one or more double bonds is replaced with a triple bond). Under appropriate reaction conditions, an alkyne group may undergo a copper-catalyzed cycloaddition upon exposure to an azide.

[0190] Phospholipids include, but are not limited to, glycerophospholipids such as phosphatidylcholines, phosphatidylethanolamines, phosphatidylserines, phosphatidylinositols, phosphatidy glycerols, and phosphatidic acids. Examples of phospholipids that can be used in the anchoring moieties disclosed herein include phosphatidylethanolamines (e.g., dilauroylphosphatidyl ethanolamine, dimyristoylphosphatidyl ethanolamine, dipalmitoylphosphatidyl ethanolamine, distearoylphosphatidyl ethanolamine, dioleoylphosphatidyl ethanolamine, 1-palmitoyl-2-oleylphosphatidyl ethanolamine, 1-oleyl-2-palmitoylphosphatidyl ethanolamine, and dierucoylphosphatidyl ethanolamine), phosphatidyl glycerols (e.g., dilauroylphosphatidyl glycerol, dimyristoylphosphatidyl glycerol, dipalmitoylphosphatidyl glycerol, distearoylphosphatidyl glycerol, dioleoylphosphatidyl glycerol, 1-palmitoyl-2-oleyl-phosphatidyl glycerol, 1-oleyl-2-palmitoyl-phosphatidyl glycerol, and dierucoylphosphatidyl glycerol); phosphatidyl serines (e.g., such as dilauroylphosphatidyl serine, dimyristoylphosphatidyl serine, dipalmitoylphosphatidyl serine, distearoylphosphatidyl serine, dioleoylphosphatidyl serine, 1-palmitoyl-2-oleyl-phosphatidyl serine, 1-oleyl-2-palmitoyl-phosphatidyl serine, and dierucoylphosphatidyl serine); phosphatidic acids (e.g., dilauroylphosphatidic acid, dimyristoylphosphatidic acid, dipalmitoylphosphatidic acid, distearoylphosphatidic acid, dioleoylphosphatidic acid, 1-palmitoyl-2-oleylphosphatidic acid, 1-oleyl-2-palmitoyl-phosphatidic acid, and dierucoylphosphatidic acid); and phosphatidyl inositols (e.g., dilauroylphosphatidyl inositol, dimyristoylphosphatidyl inositol, dipalmitoylphosphatidyl inositol, distearoylphosphatidyl inositol, dioleoylphosphatidyl inositol, 1-palmitoyl-2-oleyl-phosphatidyl inositol, 1-oleyl-2-palmitoyl-phosphatidyl inositol, and dierucoylphosphatidyl inositol. In some aspects, the AM is formed from dipalmitoylphosphatidic acid.

[0191] Phospholipids can be of a symmetric or an asymmetric type. As used herein, the term “symmetric phospholipid” includes glycerophospholipids having matching fatty acid moieties and sphingolipids in which the variable fatty acid moiety and the hydrocarbon chain of the sphingosine backbone include a comparable number of carbon atoms. As used herein, the term “asymmetric phospholipid” includes lysolipids, glycerophospholipids having different fatty acid moieties (e.g., fatty acid moieties with different numbers of carbon atoms and/or unsaturations (e.g., double bonds)), and sphingolipids in which the variable fatty acid moiety and the hydrocarbon chain of the sphingosine backbone include a dissimilar number of carbon atoms (e.g., the variable fatty acid moiety include at least two more carbon atoms than the hydrocarbon chain or at least two fewer carbon atoms than the hydrocarbon chain).

[0192] In some aspects, the anchoring moiety AM comprises a phospholipid, e.g., a symmetric phospholipid, with 10 carbons (C10), twelve carbons (C12), fourteen carbons (C14), sixteen carbons (C16) or eighteen carbons (C18). In some aspects, the anchoring moiety AM comprises a symmetric phospholipid with fourteen carbons (C14). In some aspects, the anchoring moiety AM comprises a symmetric phospholipid with sixteen carbons (C16). In some aspects, the anchoring moiety AM comprises a symmetric phospholipid with eighteen carbons (C18). In some aspects, the phospholipid in phosphatidyl ethanolamine (PE). Accordingly, in some aspects, the anchoring moiety AM comprises a C14 PE. In some aspects, the anchoring moiety AM comprises a C16 PE. In some aspects, the anchoring moiety AM comprises a C18 PE. In some aspects, the acyl chains of the PE contain no insaturations. Accordingly, in some aspects, the anchoring moiety AM comprises a C14:0 PE, a C16:0 PE, or a C18:0 PE. In some aspects, the anchoring moiety AM comprises 16:0 1,2-dipalmitoyl-sn-glycero-3-phosphoethanolamine-N-[3-(2-pyridyldithio) propionate] (16:0 PDP PE).

[0193] In some aspects, the anchoring moiety AM comprises a phospholipid comprising a cyanuric acid (cyanur) group. In some aspects, the phospholipid comprising a cyanuric acid group is a PE. In some aspects, the phospholipid comprising a cyanuric acid group is a C14:0 PE, a C16:0 PE, or a C18:0 PE. In some aspects, the anchoring moiety AM comprises 16:0 1,2-dipalmitoyl-sn-glycero-3-phosphoethanolamine-N-[4-(p-maleimidomethyl)cyclohexane-carboxamide] (16:0 PE MCC). In some aspects, the anchoring moiety AM comprises 16:0 1,2-dipalmitoyl-sn-glycero-3-phosphoethanolamine-N-(cyanur)(16:0 Cyanur PE).

[0194] In some aspects, the anchoring moiety AM comprises at least one symmetric phospholipid. Symmetric phospholipids can be selected from the non-limiting group consisting of 1,2 dipropionyl sn-glycero 3 phosphocholine (03:0 PC), 1,2 dibutyryl sn glycero 3 phosphocholine (04:0 PC), 1,2 dipentanoyl sn glycero 3 phosphocholine (05:0 PC), 1,2 dihexanoyl sn glycero 3 phosphocholine (06:0 PC), 1,2 diheptanoyl sn glycero 3 phosphocholine (07:0 PC), 1,2 dioctanoyl sn glycero 3 phosphocholine (08:0 PC), 1,2 dinonanoyl sn glycero 3 phosphocholine (09:0 PC), 1,2 didecanoyl sn glycero 3 phosphocholine (10:0 PC), 1,2 diundecanoyl sn glycero 3 phosphocholine (11:0 PC, DUPC), 1,2 dilauroyl sn glycero 3 phosphocholine (12:0 PC), 1,2 ditridecanoyl sn glycero 3 phosphocholine (13:0 PC), 1,2 dimyristoyl sn glycero 3 phosphocholine (14:0 PC, DMPC), 1,2 dipentadecanoyl sn glycero 3 phosphocholine (15:0 PC), 1,2 dipalmitoyl sn glycero 3 phosphocholine (16:0 PC, DPPC), 1,2 diphytanoyl sn glycero 3 phosphocholine (4ME 16:0 PC), 1,2 diheptadecanoyl sn glycero 3 phosphocholine (17:0 PC), 1,2 distearoyl sn glycero 3 phosphocholine (18:0 PC, DSPC), 1,2 dimyristelaidoyl sn glycero 3 phosphocholine (14:1 (49-Trans) PC), 1,2 dipalmitoleoyl sn glycero 3 phosphocholine (16:1 (49-Cis) PC), 1,2 dipalmitelaidoyl sn glycero 3 phosphocholine (16:1 (49-Trans) PC), 1,2 dipetroselenoyl sn glycero 3 phosphocholine (18:1 (46-Cis) PC), 1,2 dioleoyl sn glycero 3 phosphocholine (18:1 (49-Cis) PC, DOPC), 1,2 dielaidoyl sn glycero 3 phosphocholine (18:1 (49-Trans) PC), 1,2 dilinoleoyl sn glycero 3 phosphocholine (18:2 (Cis) PC, DLPC), 1,2 dilinolenoyl sn glycero 3 phosphocholine (18:3 (Cis) PC, DLnPC), 1,2 dihexanoyl sn glycero 3 phosphoethanolamine (06:0 PE), 1,2 dioctanoyl sn glycero 3 phosphoethanolamine (08:0 PE), 1,2 didecanoyl sn glycero 3 phosphoethanolamine (10:0 PE), 1,2 dilauroyl sn glycero 3 phosphoethanolamine (12:0 PE), 1,2 dimyristoyl sn glycero 3 phosphoethanolamine (14:0 PE), 1,2 dipentadecanoyl sn glycero 3 phosphoethanolamine (15:0 PE), 1,2 dipalmitoyl sn glycero 3 phosphoethanolamine (16:0 PE), 1,2 diphytanoyl sn glycero 3 phosphoethanolamine (4ME 16:0 PE), 1,2 diheptadecanoyl sn glycero 3 phosphoethanolamine (17:0 PE), 1,2 distearoyl sn glycero 3 phosphoethanolamine (18:0 PE, DSPE), 1,2 dipalmitoleoyl sn glycero 3 phosphoethanolamine (16:1 PE), 1,2 dioleoyl sn glycero 3 phosphoethanolamine (18:1 (49-Cis) PE, DOPE), 1,2 dielaidoyl sn glycero 3 phosphoethanolamine (18:1 (49-Trans) PE), 1,2 dilinoleoyl sn glycero 3 phosphoethanolamine (18:2 PE, DLPE), 1,2 dilinolenoyl sn glycero 3 phosphoethanolamine (18:3 PE, DLnPE), 1,2 di O octadecenyl sn glycero 3 phosphocholine (18:0 Diether PC), 1,2 dioleoyl sn glycero 3 phospho rac (1 glycerol) sodium salt (DOPG), and any combination thereof.

[0195] In some aspects, the anchoring moiety AM comprises at least one symmetric phospholipid selected from the non-limiting group consisting of DLPC, DMPC, DOPC, DPPC, DSPC, DUPC, 18:0 Diether PC, DLnPC, DAPC, DHAPC, DOPE, 4ME 16:0 PE, DSPE, DLPE,DLnPE, DAPE, DHAPE, DOPG, and any combination thereof.

[0196] In some aspects, the anchoring moiety AM comprises at least one asymmetric phospholipid. Asymmetric phospholipids can be selected from the non-limiting group consisting of 1 myristoyl 2 palmitoyl sn glycero 3 phosphocholine (14:0-16:0 PC, MPPC), 1 myristoyl 2 stearoyl sn glycero 3 phosphocholine (14:0-18:0 PC, MSPC), 1 palmitoyl 2 acetyl sn glycero 3 phosphocholine (16:0-02:0 PC), 1 palmitoyl 2 myristoyl sn glycero 3 phosphocholine (16:0-14:0 PC, PMPC), 1 palmitoyl 2 stearoyl sn glycero 3 phosphocholine (16:0-18:0 PC, PSPC), 1 palmitoyl 2 oleoyl sn glycero 3 phosphocholine (16:0-18:1 PC, POPC), 1 palmitoyl 2 linoleoyl sn glycero 3 phosphocholine (16:0-18:2 PC, PLPC), 1 palmitoyl 2 arachidonoyl sn glycero 3 phosphocholine (16:0-20:4 PC), 1 palmitoyl 2 docosahexaenoyl sn glycero 3 phosphocholine (14:0-22:6 PC), 1 stearoyl 2 myristoyl sn glycero 3 phosphocholine (18:0-14:0 PC, SMPC), 1 stearoyl 2 palmitoyl sn glycero 3 phosphocholine (18:0-16:0 PC, SPPC), 1 stearoyl 2 oleoyl sn glycero 3 phosphocholine (18:0-18:1 PC, SOPC), 1 stearoyl 2 linoleoyl sn glycero 3 phosphocholine (18:0-18:2 PC), 1 stearoyl 2 arachidonoyl sn glycero 3 phosphocholine (18:0-20:4 PC), 1 stearoyl 2 docosahexaenoyl sn glycero 3 phosphocholine (18:0-22:6 PC), 1 oleoyl 2 myristoyl sn glycero 3 phosphocholine (18:1-14:0 PC, OMPC), 1 oleoyl 2 palmitoyl sn glycero 3 phosphocholine (18:1-16:0 PC, OPPC), 1 oleoyl 2 stearoyl sn glycero 3 phosphocholine (18:1-18:0 PC, OSPC), 1 palmitoyl 2 oleoyl sn glycero 3 phosphoethanolamine (16:0-18:1 PE, POPE), 1 palmitoyl 2 linoleoyl sn glycero 3 phosphoethanolamine (16:0-18:2 PE), 1 palmitoyl 2 arachidonoyl sn glycero 3 phosphoethanolamine (16:0-20:4 PE), 1 palmitoyl 2 docosahexaenoyl sn glycero 3 phosphoethanolamine (16:0-22:6 PE), 1 stearoyl 2 oleoyl sn glycero 3 phosphoethanolamine (18:0-18:1 PE), 1 stearoyl 2 linoleoyl sn glycero 3 phosphoethanolamine (18:0-18:2 PE), 1 stearoyl 2 arachidonoyl sn glycero 3 phosphoethanolamine (18:0-20:4 PE), 1 stearoyl 2 docosahexaenoyl sn glycero 3 phosphoethanolamine (18:0-22:6 PE), 1 oleoyl 2 cholesterylhemisuccinoyl sn glycero 3 phosphocholine (OChemsPC), and any combination thereof.

[0197] To provide improved nuclease resistance, cellular uptake efficiency, and a more remarkable RNA interference effect, phosphatidylethanolamines can be used as an anchoring moiety AM, for example, dimyristoylphosphatidyl ethanolamine, dipalmitoylphosphatidyl ethanolamine, 1-palmitoyl-2-oleyl-phosphatidyl ethanolamine, and dioleoylphosphatidyl ethanolamine.

[0198] In some aspects, the anchoring moiety AM comprises or consists of a lysolipid, e.g., a lysophospholipid. Lysolipids are derivatives of a lipid in which one or both fatty acyl chains have been removed, generally by hydrolysis. Lysophospholipids are derivatives of a phospholipid in which one or both fatty acyl chains have been removed by hydrolysis.

[0199] In some aspects, the anchoring moiety comprises any of the phospholipids disclosed herein, in which one or both acyl chains have been removed via hydrolysis, and therefore the resulting lysophospholipid comprises one or no fatty acid acyl chain.

[0200] In some aspects, the anchoring moiety comprises a lysoglycerophospholipid, a lysoglycosphingoliopid, a lysophosphatidylcholine, a lysophosphatidylethanolamine, a lysophosphatidylinositol, or a lysophosphatidylserine.

[0201] In some aspect, the anchoring moiety AM comprises a lysolipid selected from the non-limiting group consisting of 1 hexanoyl 2 hydroxy sn glycero 3 phosphocholine (06:0 Lyso PC), 1 heptanoyl 2 hydroxy sn glycero 3 phosphocholine (07:0 Lyso PC), 1 octanoyl 2 hydroxy sn glycero 3 phosphocholine (08:0 Lyso PC), 1 nonanoyl 2 hydroxy sn glycero 3 phosphocholine (09:0 Lyso PC), 1 decanoyl 2 hydroxy sn glycero 3 phosphocholine (10:0 Lyso PC), 1 undecanoyl 2 hydroxy sn glycero 3 phosphocholine (11:0 Lyso PC), 1 lauroyl 2 hydroxy sn glycero 3 phosphocholine (12:0 Lyso PC), 1 tridecanoyl 2 hydroxy sn glycero 3 phosphocholine (13:0 Lyso PC), 1 myristoyl 2 hydroxy sn glycero 3 phosphocholine (14:0 Lyso PC), 1 pentadecanoyl 2 hydroxy sn glycero 3 phosphocholine (15:0 Lyso PC), 1 palmitoyl 2 hydroxy sn glycero 3 phosphocholine (16:0 Lyso PC), 1 heptadecanoyl 2 hydroxy sn glycero 3 phosphocholine (17:0 Lyso PC), 1 stearoyl 2 hydroxy sn glycero 3 phosphocholine (18:0 Lyso PC), or 1 oleoyl 2 hydroxy sn glycero 3 phosphocholine (18:1 Lyso PC), 1 myristoyl 2 hydroxy sn glycero 3 phosphoethanolamine (14:0 Lyso PE), 1 palmitoyl 2 hydroxy sn glycero 3 phosphoethanolamine (16:0 Lyso PE), 1 stearoyl 2 hydroxy sn glycero 3 phosphoethanolamine (18:0 Lyso PE), 1 oleoyl 2 hydroxy sn glycero 3 phosphoethanolamine (18:1 Lyso PE), 1 hexadecyl sn glycero 3 phosphocholine (C16 Lyso PC), and any combination thereof.

[0202] In some aspects, the anchoring moiety AM comprises, consists, or consists essentially of a vitamin, e.g., a lipophilic vitamin. Suitable vitamins include, e.g., vitamin A, vitamin B (e.g., vitamin B3 (niacin), vitamin B6 (pyridoxine), vitamin B9 (folic acid), or vitamin B12 (riboflavin)), vitamin E (tocopherol or tocotrienol), vitamin D (e.g., vitamin D₂ or ergocalciferol, vitamin D₃ or cholecalciferol, or a combination thereof), vitamin K, or a combination thereof. In some apsects, the vitamin is tocopherol, tocotrienol, vitamin D, vitamin K, riboflavin, niacin, or pyridoxine. In some aspects, the vitamin is tocopherol.

[0203] In some aspects, the anchoring moiety AM comprises or consists of vitamin D. Vitamin D is a group of fat-soluble secosteroids responsible for increasing intestinal absorption of calcium, magnesium, and phosphate, and many other biological effectsIn humans, the most important compounds in this group are vitamin D₃ (also known as cholecalciferol) and vitamin D₂ (ergocalciferol).

[chemical structure]

[0204] In some aspects, the anchoring moiety AM comprises or consists of vitamin B9 (folic acid).

[chemical structure]

[0205] In some aspects, the anchoring moiety AM comprises or consists of vitamin B2 (riboflavin).

[chemical structure]

[0206] In some aspects, the anchoring moiety AM comprises or consists of vitamin B₃ (niacin)

[chemical structure]

[0207] In some aspects, the anchoring moiety AM comprises or consists of vitamin B₆ (pyridoxine).

[chemical structure]

[0208] In some aspects, the anchoring moiety AM comprises or consists of vitamin A. Vitamin A is a group of unsaturated nutritional organic compounds that includes retinol, retinal, retinoic acid, and several provitamin A carotenoids (most notably beta-carotene). In some aspects, the anchoring moiety comprises retinol. In some aspects, the anchoring moiety comprises a retinoid. Retinoids are a class of chemical compounds that are vitamers of vitamin A or are chemically related to it. In some aspects, the anchoring moiety comprises a first generation retinoid (e.g., retinol, tretinoin, isotreatinoin, or alitretinoin), a second-generation retinoid (e.g., etretinate or acitretin), a third-generation retinoid (e.g., adapalene, bexarotene, or tazarotene), or any combination thereof.

First-generation retinoids

| | |
|---|---|
| retinol | [chemical structure] |
| tretinoin (all-trans-retinoic acid) | [chemical structure] |
| isotreatinoin (13-cis-retinoic acid) | [chemical structure] |
| alitretinoin (9-cis-retinoic acid) | [chemical structure] |

Second-generation retinoids

| | |
|---|---|
| etretinate | [chemical structure] |
| acitretin | [chemical structure] |

Third-generation retinoids

| | |
|---|---|
| adapalene | [chemical structure] |
| bexarotene | [chemical structure] |
| tazarotene | [chemical structure] |

[0209] In some aspects, the anchoring moiety AM comprises or consists of vitamin E. Tocopherols are a class of methylated phenols many of which have vitamin E activity. Thus, in some aspects, the anchoring moiety comprises alpha-tocopherol, beta-tocopherol, gamma-tocopherol, delta-tocopherol, or a combination thereof.

[chemical structure]

[0210] Tocotrienols also have vitamin E activity. The structural difference between tocotrienols and tocopherols is that tocotrienols have unsaturated isoprenoid side chain with three carbon-carbon double bonds versus saturated side chains for tocopherols. In some aspects, the anchoring moiety comprises alpha-tocotrienol, beta-tocotrienol, gamma-tocotrienol, delta-tocotrienol, or a combination thereof. Tocotrienols can be represented by the formula below

[chemical structure]

[0211] alpha (α)-Tocotrienol: R¹=Me, R²=Me, R³=Me;
[0212] beta (β)-Tocotrienol: R¹=Me, R²═H, R³=Me;
[0213] gamma (γ)-Tocotrienol: R¹=H, R²=Me, R³=Me;
[0214] delta (δ)-Tocotrienol: R¹=H, R²═H, R³=Me.

[0215] In some aspects, the anchoring moiety AM comprises or consists of vitamin K. Chemically, the vitamin K family comprises 2-methyl-1.4-naphthoquinone (3-) derivatives. Vitamin K includes two natural vitamers: vitamin K₃ and vitamin K₂. The structure of vitamin K₁ (also known as phytonadione, phylloquinone, or (E)-phytonadione) is marked by the presence of a phytyl group. The structures of vitamin K₂ (menaquinones) are marked by the polyisoprenyl side chain present in the molecule that can contain six to 13 isoprenyl units. Thus, vitamin K₂ consists of a number of related chemical subtypes, with differing lengths of carbon side chains made of isoprenoid groups of atoms. MK-4 is the most common form of vitamin K₂. Long chain forms, such as MK-7, MK-8 and MK-9 are predominant in fermented foods. Longer chain forms of vitamin K₂ such as MK-10 to MK-13 are synthesized by bacteria, but they are not well absorbed and have little biological function. In addition to the natural forms of vitamin K, there is a number of synthetic forms of vitamin K such as vitamin K₃ (menadione; 2-methylnaphthalene-1,4-dione), vitamin K₄, and vitamin K₅.

[0216] Accordingly, in some aspects, the anchoring moiety comprises vitamin K₁, K₂ (e.g., MK-4, MK-5, MK-6, MK-7, MK-8, MK-9, MK-10, MK-11, MK-12, or MK-13), K₃, K₄, K₅, or any combination thereof.

[chemical structure]

[0217] Chemically, the vitamin K family comprises 2-methyl-1,4-naphthoquinone (3-) derivatives. Vitamin K includes two natural vitamers: vitamin K₁ (phylloquinone) and vitamin K₂ (menaquinone). Vitamin K₂, in turn, consists of a number of related chemical subtypes, with differing lengths of carbon side chains made of isoprenoid groups of atoms. The two most studied ones are menaquinone-4 (MK-4) and menaquinone-7 (MK-7). Thus, in some aspects, the vitamin K is MK-4, MK-5, or a combination thereof.

[0218] In some aspects, the anchoring moiety AM can comprise a scaffold protein (e.g., a Scaffold X protein, such as PTGFRN or a fragment thereof), or a binding molecule which can bind to a scaffold protein present in the EV (e.g., exosome) membrane, for example, an antibody or a binding portion thereof that can specifically bind to PTGRN natively or recombinantly expressed on the surface of the EV (e.g., exosome). Thus, in some aspects, the anchoring moiety AM and/or the scaffold moiety is Scaffold X.

[0219] In some aspects, one or more scaffold moieties can be CD47, CD55, CD49, CD40, CD133, CD59, glypican-1, CD9, CD63, CD81, integrins, selectins, lectins, cadherins, other similar polypeptides known to those of skill in the art, or any combination thereof. Non-limiting examples of other scaffold moieties that can be used with the present disclosure include: aminopeptidase N (CD13); Neprilysin, AKA membrane metalloendopeptidase (MME); ectonucleotide pyrophosphatase/phosphodiesterase family member 1 (ENPP1); Neuropilin-1 (NRP1); or any combination thereof.

[0220] In other aspects, one or more scaffold moieties are expressed in the membrane of the EVs (e.g., exosomes) by recombinantly expressing the scaffold moieties in the producer cells. The EVs (e.g., exosomes) obtained from the producer cells can be further modified to be conjugated to a maleimide moiety or to a linker. In other aspects, the scaffold moiety, e.g., Scaffold X, is deglycosylated. In some aspects, the scaffold moiety, e.g., Scaffold X, is highly glycosylated, e.g., higher than naturally-occurring Scaffold X under the same condition.

[0221] In some aspects, the Scaffold X is selected from the group consisting of prostaglandin F2 receptor negative regulator (the PTGFRN protein); basigin (the BSG protein); immunoglobulin superfamily member 2 (the IGSF2 protein); immunoglobulin superfamily member 3 (the IGSF3 protein); immunoglobulin superfamily member 8 (the IGSF8 protein); integrin beta-1 (the ITGB1 protein); integrin alpha-4 (the ITGA4 protein); 4F2 cell-surface antigen heavy chain (the SLC3A2 protein); a class of ATP transporter proteins (the ATPIA1, ATPIA2, ATP1A3, ATPIA4, ATPIB3, ATP2B1, ATP2B2, ATP2B3, ATP2B4 proteins); a functional fragment thereof; and any combination thereof.

[0222] In some aspects, the Scaffold X comprises Prostaglandin F2 receptor negative regulator (the PTGFRN polypeptide). The PTGFRN polypeptide can be also referred to as CD9 partner 1 (CD9P-1), Glu-Trp-Ile EWI motif-containing protein F (EWI-F), Prostaglandin F2-alpha receptor regulatory protein, Prostaglandin F2-alpha receptor -associated protein, or CD315.

[0223] In some aspects, the Scaffold X is PTGFRN protein or a functional fragment thereof. In some aspects, the Scaffold X comprises an amino acid sequence as set forth in SEQ ID NO: 302. In some aspects, the Scaffold X comprises an amino acid sequence at least 50%, at least 55%, at least 60%, at least 65%, at least 70%, at least 75%, at least 80%, at least 85%, at least 90%, at least 95%, at least 96%, at least 97%, at least 98%, at least 99%, or about 100% identical to SEQ ID NO: 302.

[0224] Non-limiting examples of other Scaffold X proteins can be found at US Patent No. U.S. Pat. No. 10,195,290B1, issued Feb. 5, 2019, which is incorporated by reference in its entirety.

[0225] In the context of the present disclosure, a combination of lipid moieties, e.g., different fatty acids, different sterols, different vitamins, or combinations thereof, in an anchoring moiety AM means that some of the constructs disclosed herein, e.g., constructs of Formula I, in a population of constructs can have different anchoring moieties AM and/or linkers. For example, some constructs of Formula I will comprise a fatty acid, whereas other constructs can comprise a vitamin or a sterol. In another example, an anchoring moiety AM can comprise two lipids, e.g., a phospholipid and a fatty acid, or two phospholipids, or two fatty acids, or a lipid and a vitamin, or cholesterol and a vitamin, etc., which taken together have 6-30 carbon atoms (i.e., an equivalent carbon number (ECN) of 6-30). Selecting combinations of constructs with different anchoring moieties AM and/or linkers generally results in better packing on the lipids in the membrane on the EV (e.g., an exosome), which can result in higher loading efficiency and BAM density.

[0226] Generally, anchoring moieties are chemically attached, e.g., via solid phase synthesis. However, an anchoring moiety AM can be attached to a biologically active molecule BAM enzymatically. The anchoring moiety AM can be conjugated to a biologically active molecule BAM directly or indirectly via a linker or spacer combination, as described herein, at any chemically feasible location, e.g., at the 5′ and/or 3′ end of a nucleotide sequence, e.g., an ASO. In some aspects, the anchoring moiety AM is conjugated only to the 3′ end of the biologically active molecule BAM, directly or indirectly via a cleavable linker disclosed herein. In some aspects, the anchoring moiety AM is conjugated only to the 5′ end of a nucleotide sequence, e.g., an ASO. In one aspect, the anchoring moiety AM is conjugated at a location which is not the 3′ end or 5′ end of a nucleotide sequence, e.g., an ASO.

[0227] In some aspects, anchoring moieties AM of the present disclosure can comprise any of the hydrophobic group modifications disclosed below:

| Modification | Modfiying Group |
|---|---|
| S-Palmitoylation | [chemical structure] |
| N-Palmitoylation | [chemical structure] |
| N-Myristoylation | [chemical structure] |
| O-Acylation | [chemical structure] |
| Farnesylation | [chemical structure] |
| Geranylgeranylation | [chemical structure] |
| Cholesterol | [chemical structure] |

[0228] In some aspects, the anchoring moiety AM can comprise a spacer SP (e.g., SP₁ or SP₂) that enables connectivity to the BAM and includes the cleavable linkage, as described herein (e.g., L₁). Suitable spacers are described herein.

### Cleavable Linkage—Cell Penetrating Peptide

[0229] The present disclosure provides a construct of Formula I or II that comprises one or more cleavable linkages: L₁ and L₂ and L₃, in which one of the cleavable linkages comprises a cell penetrating peptide.

[0230] The term “cleavable linker” refers to a linker or spacer comprising at least one linkage or chemical bond that can be broken or cleaved under certain physiological conditions. As used herein, the term “cleave” refers to the breaking of one or more chemical bonds in a relatively large molecule in a manner that produces two or more relatively smaller molecules. Cleavage can be mediated, e.g., by a nuclease, peptidase, protease, phosphatase, oxidase, or reductase, for example, or by specific physicochemical conditions, e.g., redox environment, pH, presence of reactive oxygen species, or specific wavelengths of light.

[0231] In some aspects, two of L₁ and L₂ and L₃ are the same in Formula I or II. In some aspects, each of L₁ and L₂ and L₃ is different in Formula I or II. In some aspects, two of L₁, L₂, and L₃ are absent in Formula I or II, and the remaining cleavable linkage comprises the cell penetrating peptide. In an example, L₁ and L₂ are absent in Formula I or II, and L₃ comprises the cell penetrating peptide. In some aspects, one of L₁, L₂, and L₃ is absent from Formula I or II.

[0232] In the construct of Formulas I and II, at least one of the cleavable linkages comprises a cell penetrating peptide (CPP). As used herein, a “cell penetrating peptide” is a short peptide (e.g., 30 amino acids or fewer, such as 29 amino acids or fewer, 28 amino acids or fewer, 27 amino acids or fewer, 26 amino acids or fewer, 25 amino acids or fewer, 24 amino acids or fewer, 23 amino acids or fewer, 22 amino acids or fewer, 21 amino acids or fewer, 20 amino acids or fewer, 19 amino acids or fewer, 18 amino acids or fewer, 17 amino acids or fewer, 16 amino acids or fewer, 15 amino acids or fewer, 14 amino acids or fewer, 13 amino acids or fewer, 12 amino acids or fewer, 11 amino acids or fewer, 10 amino acids or fewer, 9 amino acids or fewer, 8 amino acids or fewer, 7 amino acids or fewer, 6 amino acids or fewer, 5 amino acids or fewer, 4 amino acids or fewer, 3 amino acids or fewer, or 2 amino acids) that can penetrate into cells to facilitate transfer of a BAM across the plasma membrane. In an aspect, the cell penetrating peptide can comprise 3 to 30 amino acid residues (e.g., 3 to 25 amino acid residues, 3 to 20 amino acid residues, 3 to 15 amino acid residues, 3 to 10 amino acid residues, 3 to 9 amino acid residues, 3 to 6 amino acid residues, 5 to 25 amino acid residues, 5 to 20 amino acid residues, 5 to 15 amino acid residues, 5 to 10 amino acid residues, or 5 to 9 amino acid residues).

[0233] In some aspects, the cell penetrating peptide can be linear or cyclic. In some aspects, the cell penetrating peptide is linear.

[0234] In some aspects, the cell penetrating peptide can be protein-derived, synthetic, or chimeric. In some aspects, the cell penetrating peptide can be classified as cationic, amphipathic (e.g., primary or secondary), non-amphipathic, hydrophilic, and/or hydrophobic. In some aspects, the cell penetrating peptide can be classified as cationic and hydrophobic. In some aspects, the cell penetrating peptide can be classified as cationic and hydrophilic.

[0235] In an aspect, the cell penetrating peptide is cationic, including polycationic. The charge on the cationic cell penetrating peptide can be +1 or more (e.g., +2 or more, +3 or more, +4 or more, +5 or more, +6 or more, +7 or more, +8 or more, +9 or more, +10 or more, +11 or more, +12 or more, +14 or more, +16 or more, +18 or more, +20 or more, +22 or more, +24 or more, +26 or more, or +28 or more). In general, the charge will be +30 or less (e.g., +28 or less, +26 or less, +24 or less, +22 or less, +20 or less, +18 or less, +16 or less, +14 or less, +12 or less, +11 or less, +10 or less, +9 or less, +8 or less, +7 or less, +6 or less, +5 or less, +4 or less, or +2 or less). In some aspects, the charge on the cell penetrating peptide will be in a range of 1 to 30, 1 to 25, 1 to 20, 1 to 15, 1 to 10, 1 to 8, 1 to 5, 2 to 20, 2 to 15, 2 to 10, 2 to 8, 2 to 5, 3 to 30, 3 to 25, 3 to 20, 3 to 15, 3 to 10, 3 to 8, 3 to 5, 4 to 30, 4 to 25, 4 to 15, 4 to 10, 4 to 8, 5 to 30, 5 to 25, 5 to 20, 5 to 15, 5 to 10, or 5 to 8. In an aspect, a cationic cell penetrating peptide can comprise one or more (e.g., 1, 2, 3, 4, 5, 6, 7, 8, 9, 10, 11, 12, 13, 14, or 15) residues of arginine, lysine, histidine, glutamic acid, or a combination thereof. In an aspect, a cationic cell penetrating peptide comprises Tat or Arg9.

[0236] The cell penetrating peptide can comprise naturally-occurring and/or non-natural amino acid residues. The term “naturally-occurring amino acid” refers to alanine (A or Ala), arginine (R or Arg), asparagine (N or Asn), aspartic acid (D or Asp), cysteine (C or Cys), glutamic acid (E or Glu), glutamine (Q or Gln), glycine (G or Gly), histidine (H or His), isoleucine (I or Ile), leucine (L or Leu), lysine (K or Lys), methionine (M or Met), phenylalanine (F or Phe), proline (P or Pro), serine (S or Ser), threonine (T or Thr), tryptophan (W or Trp), tyrosine (Y or Tyr), and valine (V or Val). “Non-natural amino acids” (i.e., amino acids that do not occur naturally) include, by way of non-limiting example, homoserine, homoarginine, citrulline, phenylglycine, taurine, iodotyrosine, seleno-cysteine, norleucine (“Nle”), norvaline (“Nva”), beta-alanine, L- or D-naphthalanine, ornithine (“Orn”), and the like. Peptides can be designed and optimized for enzymatic cleavage by a particular enzyme, for example, a tumor -associated protease, cathepsin B, C and D, or a plasmin protease.

[0237] Amino acids also include the D-forms of natural and non-natural amino acids. “D-” designates an amino acid having the “D” (dextrorotary) configuration, as opposed to the configuration in the naturally occurring (“L-”) amino acids. Natural and non-natural amino acids can be purchased commercially (Sigma Chemical Co., Advanced Chemtech) or synthesized using methods known in the art.

[0238] In some aspects, the cell penetrating peptide or a segment thereof can comprise low sequence diversity, e.g., comprising 50% or greater of a single amino acid, such as argininyl, cysteinyl, prolinyl, or lysinyl. In an aspect, the cell penetrating peptide or a segment thereof can be argininyl-rich, cysteinyl-rich, prolinyl-rich, or lysinyl-rich, in which the sequence or segment comprises 50% or greater of that particular amino acid.

[0239] In some aspects, the cell penetrating peptide, a segment thereof, or a side chain thereof can be classified as hydrophobic. In an aspect, hydrophobicity can be introduced by including one or more (e.g., 1, 2, 3, 4, 5, 6, 7, 8, 9, or 10, etc.) residues of tryptophan, phenylalanine, tyrosine, leucine, or a combination thereof. For example, the amino acid sequences WWWWW (SEQ ID NO: 1094) and FFLIPKG (SEQ ID NO: 1095) and the cell penetrating peptide gH 625 (a peptidyl of the sequence HGLASTLTRWAHYNALIRAF (SEQ ID NO: 1113)) are considered hydrophobic.

[0240] In some aspects, the cell penetrating peptide can comprise three or more argininyl moieties (e.g., 3, 4, 5, 6, 7, 8, 9, 10, 11, 12, 13, 14, 15, or 16 argininyl moieties). In an aspect, the cell penetrating peptide can comprise three (Arg3), six (Arg6), eight (Args), or nine (Arg9) argininyl moieties. In some aspects, the cell penetrating peptide further comprises at least one amino acid other than argininyl, such as cysteinyl, glycinyl, or a combination thereof. In some aspects, the at least one amino acid other than argininyl is cysteinyl, glycinyl, lysinyl, glutaminyl, isoleucinyl, tryptophanyl, phenylalaninyl, valinyl, threoninyl, serinyl, or a combination thereof.

[0241] In some aspects, the cell penetrating peptide comprises a cyclic peptide, TAT (a peptidyl of the sequence YGRKKRRQRRR (SEQ ID NO: 1096)), Antp (antennapedia; a peptidyl of the sequence RQIKIWFQNRRMKWKK (SEQ ID NO: 1097)), DPV3 (a peptidyl of the sequence RKKRRRESRKKRRRES (SEQ ID NO: 1098)), DPV6 (a peptidyl of the sequence GRPRESGKKRKRKRLKP (SEQ ID NO: 1099)), penetratin (a peptidyl of the sequence RQIKIWFQNRRMKWKK (SEQ ID NO: 1100)), R9-TAT (a peptidyl of the sequence GRRRRRRRRRPPQ (SEQ ID NO: 1101)), pVEC(a peptidyl of the sequence LLIILRRRIRKQAHAHSK (SEQ ID NO: 1102)), ARF (19-31)(a peptidyl of the sequence RVRVFVVHIPRLT (SEQ ID NO: 1103)), MPG (a peptidyl of the sequence GALFLGFLGAAGSTMGAWSQPKKKRKV (SEQ ID NO: 1104)), MAP (a peptidyl of the sequence KLALKLALKALKAALKLA (SEQ ID NO: 1105)), transportan (a peptidyl of the sequence GWTLNSAGYLLGKINLKALAALAKKIL (SEQ ID NO: 1106)), Bip4 (a peptidyl of the sequence VSALK (SEQ ID NO: 1107)), C105Y (a peptidyl of the sequence CSIPPEVKFNPFVYLI (SEQ ID NO: 1108)), melittin (a peptidyl of the sequence GIGAVLKVLTTGLPALISWIKRKRQQ (SEQ ID NO: 1109)), gH625 (a peptidyl of the sequence HGLASTLTRWAHYNALIRAF (SEQ ID NO: 1110)), Pep-1 (a peptidyl of the sequence KETWWETWWTEWSQPKKKRKV (SEQ ID NO: 1111)), SAP (sweet arrow peptide; a peptidyl of the sequence (VRLPPP) 3 (SEQ ID NO: 1112)), gH 625 (a peptidyl of the sequence HGLASTLTRWAHYNALIRAF (SEQ ID NO: 1113)), crot (27-29)(a peptidyl of the sequence KMDCRWRWKCCKK (SEQ ID NO: 1114)), R6/W3 (a peptidyl of the sequence RRWWRWRR (SEQ ID NO: 1115)), TP10 (a peptidyl of the sequence AGYLLGKINLKALAALAKKIL (SEQ ID NO: 1116)), CADY (a peptidyl of the sequence Ac-GLWRALWRLLRSLWRLLWRA-cysteamide (SEQ ID NO: 1117)), sC18 (a peptidyl of the sequence GLRKRLRKFRNKIKEK (SEQ ID NO: 1118)), YTA4 (a peptidyl of the sequence IAWVKAFIRKLRKGPLG (SEQ ID NO: 1119)), CyLoP-1 (a peptidyl of the sequence CRWRWKCCKK (SEQ ID NO: 1120)), GALA (a peptidyl of the sequence WEAALAEALAEALAEHLAEALAEALEALAA (SEQ ID NO: 1121)), or R6 (a peptidyl of the sequence RRRRRR (SEQ ID NO: 1122)). Other suitable examples of a cell penetrating peptide are disclosed in Kalafatovic et al., Molecules, 22 (11), 1929 (2017), which is incorporated herein by reference in its entirety.

[0242] In some aspects, the cell penetrating peptide comprises a cyclic peptide, TAT (a peptidyl of the sequence YGRKKRRQRRR (SEQ ID NO: 1096)), or Antp (antennapedia; a peptidyl of the sequence RQIKIWFQNRRMKWKK (SEQ ID NO: 1097)).

[0243] In some aspects, the cell penetrating peptide is a cyclic peptide. Examples of cyclic peptides include, e.g., cyclic Tat (cTAT, a peptide of sequence KRRRGRKKRRE (wherein K and E are connected to form a cyclic peptide)(SEQ ID NO: 1123)), cyclic [WR] +, cyclic [WR] 5, cyclic [WH] s, cyclic [KW] +, cyclic [KW] s, cyclic [CR] +, cyclic [CR] s, cyclic [HR] 5, cyclic [W (RW)+K], cyclic [C(RW)+K], C16-[r₁₂] (r=arginine), or cyclic sC18. Other suitable examples of a cyclic cell penetrating peptide are disclosed in Park et al., Molecular Pharmaceutics, 16, 3727-3743 (2019), which is incorporated herein by reference in its entirety.

[0244] In some aspects, the cell penetrating peptide is classified as primary amphipathic (e.g., Pep-1, TP10), secondary amphipathic (e.g., penetratin, R6/W3, CADY, sC18), or non-amphipathic.

### Other Cleavable Linkages

[0245] The construct of Formula I or II comprises a cell penetrating peptide. In some aspects, L₁ is present in Formula I or II and comprises the cell penetrating peptide. In some aspects, L₂ is present in Formula I or II and comprises the cell penetrating peptide. In some aspects, L₃ is present in Formula I and comprises the cell penetrating peptide.

[0246] In some aspects, at least one (i.e., 1 or 2 of L₁, L₂, and L₃) cleavable linkage of L₁, L₂, and L₃ that does not comprise the cell penetrating peptide is present and is a cleavable linkage comprising a phosphodiester bond, a disulfido, a polypeptidyl, a polynucleotidyl, a pyrophosphato, or a silyl ether, or a combination thereof.

[0247] In some aspects, the at least one (i.e., 1 or 2 of L₁, L₂, and L₃) cleavable linkage that does not comprise the cell penetrating peptide is a cleavable linkage comprising a phosphodiester bond.

[0248] In some aspects, the at least one (i.e., 1 or 2 of L₁, L₂, and L₃) cleavable linkage that does not comprise the cell penetrating peptide is a cleavable linkage comprising a disulfido bond.

[0249] In some aspects, the at least one (i.e., 1 or 2 of L₁, L₂, and L₃) cleavable linkage that does not comprise the cell penetrating peptide comprises a polynucleotidyl. In some aspects, the polynucleotidyl is a trinucleotidyl or higher, such as a tetranucleotidyl or higher, a pentanucleotidyl or higher, a hexanucleotidyl or higher, a heptanucleotidyl or higher, an octanucleotidyl or higher, a nonanucleotidyl or higher, or a decanucleotidyl or higher. Typically, the polynucleotidyl is not longer than 50 nucleotides in length (e.g., 45 nucleotides or fewer, 40 nucleotides or fewer, 35 nucleotides or fewer, 30 nucleotides or fewer, 25 nucleotides or fewer, 20 nucleotides or fewer, 15 nucleotides or fewer, 14 nucleotides or fewer, 13 nucleotides or fewer, 12 nucleotides or fewer, 11 nucleotides or fewer, 10 nucleotides or fewer, 9 nucleotides or fewer, 8 nucleotides or fewer, 7 nucleotides or fewer, 6 nucleotides or fewer, 5 nucleotides or fewer, 4 nucleotides or fewer, or 3 nucleotides). In some aspects, L₁ comprises a tetranucleotidyl.

[0250] In general, the polynucleotidyl will comprise adenylic acid (AMP, dAMP), guanylic acid (GMP, dGMP), cytidylic acid (CMP, dCMP), thymidylic acid (dTMP), uridylic acid (UMP), or any combination thereof. In an example, the polynucleotidyl is a tetranucleotidyl comprising dTdTdTdT, wherein dT is thymidylic acid.

[0251] In some aspects, the at least one (i.e., 1 or 2 of L₁, L₂, and L₃) cleavable linkage that does not comprise the cell penetrating peptide is a cleavable linkage comprising a pyrophosphato bond. In some aspects, a pyrophosphato bond is of the formula

[chemical structure]

wherein X+ is a monovalent cation, such as a proton (H⁺) or a Group I cation (e.g., Li⁺, Na⁺, K⁺, or Rb⁺) and [symbol] denotes connectivity to AM, BAM, or a spacer.

[0252] In some aspects, the at least one (i.e., 1 or 2 of L₁, L₂, and L₃) cleavable linkage that does not comprise the cell penetrating peptide is a cleavable linkage comprising a silyl ether. In some aspects, a silyl ether bond comprises —OSiR¹R²O—, wherein R¹ and R² are the same or different and each is C₁₋₈ alkyl (e.g., methyl, ethyl, n-propyl, isopropyl, n-butyl) or aryl (e.g., phenyl). In an example, R¹ and R² are both isopropyl.

[0253] In some aspects, two of L₁, L₂, and L₃ are the same and each is a cleavable linkage comprising a phosphodiester bond, a disulfido, or a polypeptidyl that is not a cell penetrating peptide. In some aspects, one of L₁, L₂, and L₃ is a cleavable linkage comprising a phosphodiester bond, and the other cleavable linkage that does not comprise the cell penetrating peptide is a cleavable linkage comprising a disulfido bond. In some aspects, L₁ is a cleavable linkage comprising a phosphodiester bond, L₂ is a cleavable linkage comprising a disulfido bond, and L₃ comprises the cell penetrating peptide. In some aspects, L₁ is a cleavable linkage comprising a disulfido bond, L₂ is a cleavable linkage comprising a phosphodiester bond, and and L₃ comprises the cell penetrating peptide. In some aspects, L₁ comprises the cell penetrating peptide, L₂ is a cleavable linkage comprising a disulfido or phosphodiester bond, and L₃ is absent. In some aspects, L₁ is a cleavable linkage comprising a disulfido or phosphodiester bond, L₂ comprises the cell penetrating peptide, and L₃ is absent. In some aspects, L₃ comprises the cell penetrating peptide and both L₁ and L₂ are absent.

[0254] In some aspects, the linker combination not comprising the cell penetrating peptide can comprise a cleavable likage that is cleavable by intracellular or extracellular enzymes, e.g., a protease, an esterase, a nuclease, an amidase. The range of enzymes that can cleave a specific linker in a linker combination depends on the specific bonds and chemical structure of the linker. Accordingly, peptidic linkers can be cleaved, e.g., by a peptidase, linkers containing ester linkages can be cleaved, e.g., by an esterase; linkers containing amide linkages can be cleaved, e.g., by an amidase; etc.

[0255] In some aspects, the linker combination not comprising the cell penetrating peptide comprises an additional cleavable linkage that is a protease cleavable linkage, i.e., a linker that can be cleaved by an endogenous protease. Only certain peptides are readily cleaved inside or outside cells. See, e.g., Trout et al., Proc. Natl. Acad. Sci. USA, 79:626-629 (1982) and Umemoto et al., Int. J. Cancer, 43:677-684 (1989), the contents of which are incorporated herein by reference in their entireties. Protease cleavable linkers can contain one or more cleavable sites composed of a-amino acid units and peptidic bonds, which chemically are amide bonds between the carboxylate of one amino acid and the amino group of a second amino acid. Other amide bonds, such as the bond between a carboxylate and the α-amino acid group of lysine, are understood not to be peptidic bonds and are considered non-cleavable.

[0256] In some aspects, the additional protease cleavable linker can comprise a peptide comprising 1 to 100 amino acid residues, i.e., a peptide that is not considered to be a cell penetrating peptide. In some aspects, the peptide linker can comprise at least two, at least three, at least four, at least five, at least 10, at least 15, at least 20, at least 25, at least 30, at least 35, at least 40, at least 45, at least 50, at least 55, at least 60, at least 65, at least 70, at least 75, at least 80, at least 85, at least 90, at least 95, or at least 100 amino acids. In these aspects, the peptide allows for cleavage of the linker by a protease, thereby facilitating release of the biologically active molecule upon exposure to intracellular proteases, such as lysosomal enzymes (Doronina et al., Nat. Biotechnol., 21:778-784 (2003)). Exemplary peptides include, but are not limited to, dipeptides, tripeptides, tetrapeptides, pentapeptides, and hexapeptides.

[0257] A peptide can comprise naturally-occurring and/or non-natural amino acid residues. The term “naturally-occurring amino acid” refers to alanine (Ala), arginine (Arg), asparagine (Asn), aspartic acid (Asp), cysteine (Cys), glutamic acid (Glu), glutamine (Gln), glycine (Gly), histidine (His), isoleucine (Ile), leucine (Leu), lysine (Lys), methionine (Met), phenylalanine (Phe), proline (Pro), serine (Ser), threonine (Thr), tryptophan (Trp), tyrosine (Tyr), and valine (Val).

[0258] “Non-natural amino acids” (i.e., amino acids that do not occur naturally) include, by way of non-limiting example, homoserine, homoarginine, citrulline, phenylglycine, taurine, iodotyrosine, seleno-cysteine, norleucine (“Nle”), norvaline (“Nva”), beta-alanine, L- or D-naphthalanine, ornithine (“Orn”), and the like. Peptides can be designed and optimized for enzymatic cleavage by a particular enzyme, for example, a tumor -associated protease, cathepsin B, C and D, or a plasmin protease.

[0259] Amino acids also include the D-forms of natural and non-natural amino acids. “D-” designates an amino acid having the “D” (dextrorotary) configuration, as opposed to the configuration in the naturally occurring (“L-”) amino acids. Natural and non-natural amino acids can be purchased commercially (Sigma Chemical Co., Advanced Chemtech) or synthesized using methods known in the art.

[0260] Exemplary dipeptides include, but are not limited to, valine-glycine (Val-Gly), glycine-glycine (Gly-Gly), cyclobutane-1,1-dicarboxamide-citrulline (cBu-Cit), valine-alanine (Val-Ala), valine-citrulline (Val-Cit), phenylalanine-lysine (Phe-Lys), N-methyl-valine-citrulline, cyclohexylalanine-lysine, and beta-alanine-lysine. Exemplary tripeptides include, but are not limited to, glutamic acid-valine-citrulline (Glu-Val-Cit), aspartic acid-valine-citrulline (Asp-Val-Cit), serine-valine-citrulline (Ser-Val-Cit), alanine-phenylalanine-lysine (Ala-Phe-Lys), lysine-valine-citrulline (Lys-Val-Cit), alanine-alanine-asparagine (Ala-Ala-Asn), glycine-valine-citrulline (Gly-Val-Cit) and glycine-glycine-glycine (Gly-Gly-Gly). An exemplary higher peptide includes, but is not limited to, glycine-glycine-glycine-valine-citrulline (Gly-Gly-Gly-Val-Cit).

[0261] In some aspects, the at least one (i.e., 1 or 2 of L₁, L₂, and L₃) cleavable linkage that does not comprise the cell penetrating peptide is a cleavable linkage that can comprise a peptidyl, i.e., a peptidyl that is not considered a cell penetrating peptide. Suitable examples of such cleavable peptide linkages include alanine-alanine-asparagine, valine-glycine, glycine-glycine, glutamic acid-valine-citrulline, aspartic acid-valine-citrulline, serine-valine-citrulline, lysine-valine-citrulline, glycine-glycine-glycine-valine-citrulline, cyclobutane-1,1-dicarboxamide-citrulline, or alanine-phenylalanine-lysine). In some aspects, L₁, L₂, and/or L₃ can comprise a peptidyl comprising alanine-alanine-asparagine. In some aspects, the peptidyl comprises valine-glycine. In some aspects, the peptidyl comprises glycine-glycine. In some aspects, the peptidyl comprises glutamic acid-valine-citrulline. In some aspects, the peptidyl comprises aspartic acid-valine-citrulline. In some aspects, the peptidyl comprises serine-valine-citrulline. In some aspects, the peptidyl comprises lysine-valine-citrulline. In some aspects, the peptidyl comprises glycine-glycine-glycine-valine-citrulline. In some aspects, the peptidyl comprises cyclobutane-1,1-dicarboxamide-citrulline (cBu-Cit). In some aspects, the peptidyl comprises alanine-phenylalanine-lysine.

[0262] In some aspects, the peptide linker is synthetic, i.e., non-naturally occurring. In one aspect, a peptide linker includes peptides (or polypeptides)(e.g., natural or non-naturally occurring peptides) which comprise an amino acid sequence that links or genetically fuses a first linear sequence of amino acids to a second linear sequence of amino acids to which it is not naturally linked or genetically fused in nature. For example, in one aspect the peptide linker can comprise non-naturally occurring polypeptides which are modified forms of naturally occurring polypeptides (e.g., comprising a mutation such as an addition, substitution or deletion).

[0263] In some aspects, the linker comprises a glycine/serine linker. In some aspects, the peptide linker is glycine/serine linker according to the formula [(Gly)ₙ-Ser] m, where n is any integer from 1 to 100 and m is any integer from 1 to 100. In other aspects, the glycine/serine linker is according to the formula [(Gly) x-(Ser);] 2, wherein x in an integer from 1 to 4, y is 0 or 1, and z is an integer from 1 to 50. In some aspects, the peptide linker comprises the sequence Glyn, where n can be an integer from 1 to 100. In some aspects, the peptide linker can comprise the sequence (GlyAla) n, wherein n is an integer between 1 and 100. In other aspects, the peptide linker can comprise the sequence (GlyGlySer) n, wherein n is an integer between 1 and 100.

[0264] In some aspects, the protease-cleavable linker comprises a cleavage site for a protease, e.g., neprilysin (common acute lymphoblastic leukemia antigen (CALLA) or CD10), thimet oligopeptidase (TOP), leukotriene A4 hydrolase, endothelin converting enzymes, ste24 protease, neurolysin, mitochondrial intermediate peptidase, interstitial collagenases, collagenases, stromelysins, macrophage elastase, matrilysin, gelatinases, meprins, procollagen C-endopeptidases, procollagen N-endopeptidases, ADAMs and ADAMTs (A Disintegrin and Metalloproteinase with Thrombospondin) metalloproteinases, myelin associated metalloproteinases, enamelysin, tumor necrosis factor α-converting enzyme, insulysin, nardilysin, mitochondrial processing peptidase, magnolysin, dactylysin-like metalloproteases, neutrophil collagenase, matrix metallopeptidases, membrane-type matrix metalloproteinases, SP₂ endopeptidase, prostate specific antigen (PSA), plasmin, urokinase, human fibroblast activation protein (FAPa), trypsin, chymotrypsins, caldecrin, pancreatic elastases, pancreatic endopeptidase, enteropeptidase, leukocyte elastase, myeloblasts, chymases, tryptase, granzyme, stratum corneum chymotryptic enzyme, acrosin, kallikreins, complement components and factors, alternative-complement pathway c3/c5 convertase, mannose-binding protein-associated serine protease, coagulation factors, thrombin, protein c, u and t-type plasminogen activator, cathepsin G, hepsin, prostasin, hepatocyte growth factor -activating endopeptidase, subtilisin/kexin type proprotein convertases, furin, proprotein convertases, prolyl peptidases, acylaminoacyl peptidase, peptidyl-glycaminase, signal peptidase, n-terminal nucleophile aminohydrolases, 20s proteasome, γ-glutamyl transpeptidase, mitochondrial endopeptidase, mitochondrial endopeptidase Ia, htra2 peptidase, matriptase, site 1 protease, legumain, cathepsins, cysteine cathepsins, calpains, ubiquitin isopeptidase T, caspases, glycosylphosphatidylinositoliprotein transamidase, cancer procoagulant, prohormone thiol protease, γ-glutamyl hydrolase, bleomycin hydrolase, seprase, cathepsin B, cathepsin D, cathepsin L, cathepsin M, proteinase K, pepsins, chymosyn, gastricsin, renin, yapsin and/or mapsins, Prostate-Specific antigen (PSA), or any Asp-N, Glu-C, Lys-C or Arg-C proteases in general. See, e.g., Caculitan et al., Cancer Res., 77 (24): 7027-7037 (2017), which is herein incorporated by reference in its entirety.

### Enzymatic Cleavable Linkers: Esterase Cleavable Linkers

[0265] Some additional cleavable linkages can be cleaved by esterases (“esterase cleavable linkers”). Only certain esters can be cleaved by esterases and amidases present inside or outside of cells. Examples of ester-based cleavable linking groups include, but are not limited to, esters of alkylene, alkenylene, and alkynylene groups. The ester cleavable linking group has the general formula —C(O)O— or —OC(O)—.

### Enzymatic Cleavable Linkers: Phosphatase Cleavable Linkers

[0266] In some aspects, a linker combination can include an additional cleavable linker that can be a phosphate-based cleavable linking group that can be cleaved by an agent that degrades or hydrolyzes phosphate groups, such as intracellular phosphatase. Examples of cleavable phosphate-based linkages are —O—P(O)(ORₖ)O—, —O—P(S)(ORₖ)—O—, —O—P(S)(SRK)—O—, —S—P(O)(ORₖ)—O—, —O—P(O)(ORₖ)—S—, —S—P(O)(ORₖ)—S—, —O—P(S)(ORₖ)—S—, —SP(S) (ORₖ)—O—, —OP(O)(Rₖ)—O—, —OP(S)(Rₖ)—O—, —SP(O)(Rₖ)—O—, —SP(S)(Rₖ)—O—, —SP(O)(Rₖ)—S—, or —OP(S)(Rₖ)—S—. In various aspects, Rₖ is any of the following: NH₂, BH₃, CH₃, C₁₋₆ alkyl, C₆₋₁₀ aryl, C₁₋₆ alkoxy and C₆₋₁₀ aryloxy. In some aspects, C₁₋₆ alkyl and C₆₋₁₀ aryl are unsubstituted. Further non-limiting examples are —O—P(O)(OH)—O—, —O—P(S)(OH)—O—, —O—P(S)(SH)—O—, —S—P(O)(OH)—O—, O—P(O)(OH)—S—, —S—P(O)(OH)—S—, —O—P(S)(OH)—S—, —S—P(S)(OH)—O—, —O—P(O)(H)—O—, —O—P(S)(H)—O—, —S—P(O)(H)—O—, —SP(S)(H)—O—, —SP(O)(H)—S—, —OP(S)(H)—S—, and —O—P(O)(OH)—O—.

### Photoactivated Cleavable Linkers

[0267] In some aspects, the combination linker comprises an additional cleavable linkage comprising a photoactivated cleavable linkage, such as a nitrobenzyl linkage or a linker comprising a nitrobenzyl reactive group.

[0268] In some aspects, the additional cleavable linkage can comprise a dinucleotidyl (e.g., Val-Cit dipeptidyl) bond, a trinucleotidyl bond, a disulfido (—S—S—) bond, an imino bond, a thioketal bond, or any combination thereof.

[0269] In some aspects, the additional cleavable linkage comprises valine-alanine-p-aminobenzylcarbamato or valine-citrulline-p-aminobenzylcarbamato.

### Self-immolative Linker

[0270] In some aspects, the at least one (i.e., 1 or 2 of L₁, L₂, and L₃) cleavable linkage that does not comprise the cell penetrating peptide is a cleavable linkage that can comprise or consist of a self-immolative linker. The term “self-immolative linker” as used herein refers to a spacer that will spontaneously separate from a first moiety (e.g., a biologically active molecule, linkage, spacer, or anchoring moiety) if its bond to a second moiety (e.g., a biologically active molecule, linkage, spacer, or anchoring moiety) is cleaved.

[0271] In some aspects, the self-immolative linker is, e.g., a p-aminobenzyl (pAB) derivative, such as a p-aminobenzyl carbamate (pABC), a p-amino benzyl ether (PABE), a p-amino benzyl carbonate, or a combination thereof. In certain aspects, the self-immolative linker comprises an aromatic group or a heterocyclic group. In some aspects, the aromatic group is selected from the group consisting of benzyl, cinnamyl, naphthyl, and biphenyl. In other aspects, the aromatic group comprises at least one (e.g., 1, 2, 3, or 4) substituent (e.g., F, Cl, I, Br, OH, methyl, methoxy, NO₂, NH₂, NO₃, NHCOCH₃, N(CH₃)₂, NHCOCF₃, alkyl, haloalkyl, carboxylato, sulfato, sulfamato, and/or sulfonato). In other aspects, at least one C in the aromatic group is substituted with N, O, or C—R*, wherein R* is independently selected from H, F, Cl, I, Br, OH, methyl, methoxy, NO₂, NH₂, NO₃⁻, NHCOCH₃, N (CH₃)₂, NHCOCF₃, alkyl, haloalkyl, carboxylato, sulfato, sulfamato, and sulfonato.

[0272] In some aspects, L₁ comprises or consists of a self-immolative linker (e.g., p-aminobenzyl carbamate, pABC). In some aspects, L₂ comprises or consists of a self-immolative linker (e.g., p-aminobenzyl carbamate, pABC). In some aspects, L₃ comprises or consists of a self-immolative linker (e.g., p-aminobenzyl carbamate, pABC).

[0273] The aromatic ring of the aminobenzyl group can optionally be substituted with one or more (e.g., R¹ and/or R²) substituents on the aromatic ring, which replace a hydrogen that is otherwise attached to one of the four non-substituted carbons that form the ring. As used herein, the symbol “R^{X}” (e.g., R¹, R², R³, R⁴) is a general abbreviation that represents a substituent group as described herein. Substituent groups can improve the self-immolative ability of the p-aminobenzyl group (see, e.g., Hay et al., J. Chem Soc., Perkin Trans., 1:2759-2770 (1999); and Sykes et al., J. Chem. Soc., Perkin Trans., 1:1601-1608 (2000)). Substituent groups in self-immolative, for example, R¹ and/or R² substituents in a p-aminobenzyl self-immolative linker as discuss above can include, e.g., alkyl, alkylenyl, alkenyl, alkynyl, alkoxy, alkylamino, alkylthio, heteroalkyl, cycloalkyl, heterocycloalkyl, aryl, arylalkyl, aryloxy, heteroaryl, etc. When a compound of the present disclosure includes more than one substituent, then each of the substituents is independently chosen. Where substituent groups in the self-immolative linker are specified by their conventional chemical formulae, written from left to right, they equally encompass the chemically identical substituents, which would result from writing the structure from right to left. For example, “—CH₂O—” is intended to also recite “—OCH₂—”.

[0274] In some aspects, the self-immolative linker can comprise or consist of a cinnamyl, a naphthyl, a biphenyl, a heterocyclyl, a homoaromatic group, coumarinyl, furanyl, thiophenyl, thiazolyl, oxazolyl, isoxazolyl, pyrrolyl, pyrazolyl, pyridinyl, imidazonyl, triazolyl, or any combination thereof. In some aspects, L₁ comprises a cleavable linker selected from the group consisting of a cinnamyl, a naphthyl, a biphenyl, a heterocyclyl, a homoaromatic group, coumarinyl, furanyl, thiophenyl, thiazolyl, oxazolyl, isoxazolyl, pyrrolyl, pyrazolyl, pyridinyl, imidazonyl, triazolyl, or any combination thereof. In some aspects, L₂ comprises a cleavable linker selected from the group consisting of a cinnamyl, a naphthyl, a biphenyl, a heterocyclyl, a homoaromatic group, coumarinyl, furanyl, thiophenyl, thiazolyl, oxazolyl, isoxazolyl, pyrrolyl, pyrazolyl, pyridinyl, imidazonyl, triazolyl, or any combination thereof. In some aspects, L₃ comprises a cleavable linker selected from the group consisting of a cinnamyl, a naphthyl, a biphenyl, a heterocyclyl, a homoaromatic group, coumarinyl, furanyl, thiophenyl, thiazolyl, oxazolyl, isoxazolyl, pyrrolyl, pyrazolyl, pyridinyl, imidazonyl, triazolyl, or any combination thereof.

[0275] In some aspects, the self-immolative linker connects a biologically active molecule BAM (e.g., an ASO) to a protease-cleavable peptidyl (e.g., Val-Cit). In specific aspects, the carbamate group of a pABC self-immolative linker is connected to an amino group of a biologically active molecule BAM (e.g., ASO), and the amino group of the pABC self-immolative linker is connected to a protease-cleavable peptidyl.

[0276] Self-immolative elimination can take place, e.g., via 1,4 elimination, 1,6 elimination (e.g., pABC), 1,8 elimination (e.g., p-amino-cinnamyl alcohol), β-elimination, cyclization-elimination (e.g., 4-aminobutanol ester and ethylenediamines), cyclization/lactonization, cyclization/lactolization, etc. See, e.g., Singh et al., Curr. Med. Chem., 15:1802-1826 (2008); and Greenwald et al., J. Med. Chem., 43:475-487 (2000).

[0277] In some aspects, a linker combination disclosed herein can comprise more than one self-immolative linker in tandem, e.g., two or more pABC units. In some aspects, a linker combination disclosed herein can comprise a self-immolative linker (e.g., a p-aminobenzylalcohol or a hemithioaminal derivative of p-carboxybenzaldehyde or glyoxilic acid) linked to a fluorigenic probe.

[0278] In some aspects, a cleavable linkage disclosed herein, e.g., an L₁, L₂, or L₃ linkage or any combination thereof that does not comprise the cell penetrating peptide can comprise or consist of a linkage (generally a dipeptide or tripeptide linker) having the formula:

[chemical structure]

wherein each -A- is independently an amino acid unit or a combination thereof, a is independently an integer from 1 to 15; -Y- is a spacer unit, as described herein, and y is 0, 1, or 2. In some aspects, Li comprises or consists of the -Aa-Yy- linker. In some aspects, L₂ comprises or consists of the Aa-Yy-linker. In some aspects, L₃ comprises or consists of the -Aa-Yy- linker.

[0279] In some aspects -Aa- is a dipeptidyl, a tripeptidyl, a tetrapeptidyl, a pentapeptidyl, or a hexapeptidyl. In some aspects wherein a is 2 (i.e., a dipeptidyl cleavable linker), -Aa-is selected from the group consisting of valine-alanine, valine-citrulline, phenylalanine-lysine, N-methylvaline-citrulline, cyclohexylalanine-lysine, and beta-alanine-lysine. In some aspects wherein a is 3 (i.e., a tripeptidyl cleavable linker), -Aa-is glutamic acid-valine-citrulline. In some aspects, y is 1, i.e., the cleavable linker of formula -Aa-Yy-comprises a single spacer. In some aspects, the cleavable linker of formula -Aa-Yy-can comprises more than one spacer, e.g., two spacers. In some aspects, the two spacers are the same. In other aspects, the two spacers are different. In some aspects, the single spacer can be cleavable or non-cleavable. In some aspects, the first spacer (proximal to Aa) can be cleavable and the second spacer (distal to Aa) can be non-cleavable. In some aspects, the first spacer (proximal to Aa) can be non-cleavable and the second spacer (distal to Aa) can be cleavable. In some aspects, both spacers can be non-cleavable. In some aspects, both spacer can be cleavable.

[0280] In some aspects, a-Y-spacer can be a self-immolative spacer, e.g., p-aminobenzylcarbamate (pABC). In some aspects, -Yy- has the formula:

[chemical structure]

wherein each R² is independently C₁₋₈ alkyl, —O—(C₁₋₈ alkyl), halo, nitro, or cyano; and m is 0 or an integer from 1 to 4 (i.e., 0, 1, 2, 3, or 4). In some aspects, m is 0, 1, or 2. In some aspects, m is 0.

[0281] In some aspects, a cleavable linkage disclosed herein, e.g., an L₁, L₂, or L₃ linkage or any combination thereof comprises or consists of valine-alanine-p-aminobenzylcarbamate or valine-citrulline-p-aminobenzylcarbamate.

[0282] In some aspects, -Y-is a non self-immolative spacer, e.g., a peptidyl spacer. Peptidyl spacers are generally glycine (Gly) based spacers or glycine-serine (Gly/Ser) based spacers. In some aspects, the Y-peptidyl spacer comprises or consists of Gly- or Gly-Gly-. Other peptide spacers such as the (Gly₄Ser) n spacer are described herein.

### Spacers

[0283] Typically, the cleavable linkage L₁, L₂, and/or L₃ is part of a spacer (e.g., SP₁, SP₂, SP₃, and/or SP₄) between the anchoring moiety AM and the biologically active molecule BAM to provide the optimal spacing between the anchoring moiety or moieties AM and the biologically active molecule or molecules BAM. For example, in the case of an antisense oligonucleotide (ASO), one goal of a combination of linker and spacers is to reduce steric hindrance and position the ASO so it can interact with a target nucleic acid, e.g., an mRNA or an miRNA. Other goals can include, for example, increasing the loading efficiency of the EV (e.g., an exosome), increasing the number of BAM per EV, increasing the surface density of BAM on the EV, increasing the potency of the BAM after incorporate to the EV, or any combination thereof. In the context of the present disclosure, the term “linker combination” refers to the combination of a cleavable linkage L₁, L₂, and/or L₃ and one or more spacers that forms the construct of Formula I or II disclosed herein.

[0284] In some aspects, SP₁ is present in Formula I or II. In some aspects, SP₂ is present in Formula I or II. In some aspects, SP₃ is present in Formula I or II. In some aspects, SP₄ is present in Formula I. In some aspects, SP₁ and SP₂ are both present in Formula I or II. In some aspects, SP₁ and SP₃ are both present in Formula I or II. In some aspects, SP₁ and SP₄ are both present in Formula I. In some aspects, SP₂ and SP₃ are both present in Formula I or II. In some aspects, SP₂ and SP₄ are both present in Formula I. In some aspects, SP₃ and SP₄ are both present in Formula I. In some aspects, SP₁, SP₂, and SP₃ are present in Formula I or II. In some aspects, SP₁, SP₂, and SP₄ are present in Formula I. In some aspects, SP₂, SP₃, and SP₄ are present in Formula I. In some aspects, SP₁, SP₂, SP₃, and SP₄ are present in Formula I.

[0285] In some aspects, the cleavable linkage L₁, L₂, and/or L₃ is part of a spacer moiety, i.e., SP₁, SP₂, SP₃, and/or SP₄, prior to conjugation to AM and/or BAM. In some aspects, L₁ is part of SP₂ and AM is part of SP₁ prior to conjugation to BAM. In some aspects, L₁ and L₂ are part of both SP₁ and SP₂ and AM and BAM is part of SP₃ prior to conjugation to one another. In some aspects, L₁ and L₂ are part of SP₂, SP₃, and BAM and AM is part of SPI prior to conjugation to one another. In some aspects, L₁ and L₂ are part of both SP₁ and SP₂ prior to conjugation to AM and BAM. In some aspects, L₁ is part of SP₁ and AM and L₂ is part of SP₂ prior to conjugation to BAM. In some aspects, L₁ is part of both SP₁, SP₂, and AM and L₂ is part of SP₃ and BAM prior to conjugation to AM.

[0286] In some aspects, SP₁, SP₂, SP₃, and SP₄ of Formula I or II are the same or different and each comprises an alkylenyl, a polyoxyalkylenyl, a succinimido, a maleimido, an aryl (e.g., 1,2-phenyl, 1,3-phenyl, or 1,4-phenyl), an ether (—O—), a carbonyl (—C(O)—), a carboxy (—C(O)O- or —OC(O)—), a carbamoyl (—OC(O)NR— or —NRC(O)O—), a thioether (—S—), a sulfo (—SO₂—), a thiocarbonyl (—C(S)—), a thiocarbamoyl (—OC(S)NR— or —NRC(S)O—), a thiosuccinimido, an amino (—NR—), an amido (—C(O)NR— or —NRC(O)—), a hydrazido (—NH—NH—), a phosphorothioato (—OP(═S)(OH)O—), a 1,2,3-triazolyl, a dibenzoylcyclooctenyl, a bicyclononenyl, a p-aminobenzoyl, a p-aminobenzylcarbamato, or a combination thereof, and at least one of SP₁, SP₂, SP₃, and SP₄ is present. The following moieties are associated with the provided structures

[chemical structure]

wherein [symbol] denotes connectivity to AM, BAM, L₁, L₂, L₃, or the remainder of the spacer.

[0287] In some aspects, at least one of SP₁, SP₂, SP₃, and SP₄ comprises C₁₋₈ alkylenyl, polyoxyalkenyl, a maleimido, a carbamoyl, a thio, an amido, a 1,2,3-triazolyl, a dibenzoylcyclooctenyl, a bicyclononenyl, a p-aminobenzoyl, a p-aminobenzylcarbamato, or a combination thereof. In some aspects, at least one of SP₁, SP₂, SP₃, and SP₄ (e.g., SP₁ and SP₂, SP₂ and SP₃, or SP₁ and SP₃) comprises C₁₋₆ alkylenyl (i.e., C₁ alkylenyl, C₂ alkylenyl, C₃ alkylenyl, C₄ alkylenyl, C₅ alkylenyl, or C₆ alkylenyl), as described herein. In some aspects, at least one of SP₁ and SP₂ comprises a polyoxyalkylenyl (e.g., a glycol-based spacer) that comprises 2 to 15 —OCH₂CH₂-repeat units, as described herein. In some aspects, the polyoxyalkylenyl (e.g., a glycol-based spacer) that comprises 4 (TEG) or 6 (HEG) —OCH₂CH₂-repeat units, as described herein. In some aspects, at least one of SP₁, SP₂, SP₃, and SP₄ (e.g., SP₁, SP₂, and SP₃) comprises C₁₋₆ alkylenyl or a polyoxyalkylenyl (e.g., a glycol-based spacer) that comprises 2 to 15 —OCH₂CH₂-repeat units, as described herein, and further comprises comprises a carbamoyl, an amino, an amido, a thiosuccinimido, 1,2,3-triazolydibenzoylcyclooctenyl, a 1,2,3-triazolylbicyclononenyl, or a combination thereof, wherein the 1,2,3-triazolydibenzoylcyclooctenyl has the structure

[chemical structure]

and
the 1,2,3-triazolylbicyclononenyl has the structure:

[chemical structure]

wherein [symbol] denotes connectivity to AM, BAM, L₁, L₂, L₃, or the remainder of the spacer.

### Alkylenyl Spacer

[0288] In some aspects, a spacer (e.g., SP₁, SP₂, SP₃, and/or SP₄) in Formula I can comprise an alkylenyl spacer, such as a linear alkylenyl spacer. In some aspects, the alkylenyl spacer attached to the anchoring moiety AM and/or BAM is selected from the group consisting of C1, C2, C3, C4, C5, C6, C7, C8, C9, C10, C11, C12, C13, C14, or C15, wherein C denotes a divalent methylene unit (—CH₂—) and the numeral indicates the number of methylene units in the alkylenyl spacer. In some aspects, the alkylenyl spacer comprises a single methylenyl (C1; —CH₂—). In some aspects, the alkylenyl spacer is C2 (—CH₂CH₂—). In some aspects, the alkylenyl spacer is C3. In some aspects, the alkylenyl spacer is C4. In some aspects, the alkylenyl spacer is C5. In some aspects, the alkylenyl spacer is C6. In some aspects, the alkylenyl spacer is C7. In some aspects, the alkylenyl spacer is C8. In some aspects, the alkylenyl spacer is C9. In some aspects, the alkylenyl spacer is C10. In some aspects, the alkylenyl spacer is C11. In some aspects, the alkylenyl spacer is C12. In some aspects, the alkylenyl spacer is C13. In some aspects, the alkylenyl spacer is C14. In some aspects, the alkylenyl spacer is C15.

[0289] In some aspects, one or more spacers (e.g., SP₁, SP₂, SP₃, and/or SP₄) in Formula I independently comprise an alkylenyl spacer, a glycol-based spacer, or a combination thereof. In some aspects, the SPI optional first spacer comprises or consists of an alkylenyl spacer which is C1, C2, C3, C4, C5, C6, C7, C8, C9, C10, C11, C12, C13, C14, or C15 (e.g., propylene, butylene, hexylene, C2-C15 alkylene, C2-C10 alkylene, or C2-C6 alkylene). In some aspects, SPI is a C3 or C6 alkylenyl spacer. In some aspects, the SP₂ optional second spacer comprises or consists of an alkylenyl spacer which is C1, C2, C3, C4, C5, C6, C7, C8, C9, C10, C11, C12, C13, C14, or C15 (e.g., propylene, butylene, hexylene, C2-C15 alkylene, C2-C10 alkylene, or C2-C6 alkylene). In some aspects, SP₂ is a C3 or C6 alkylenyl spacer. In some aspects, the SP3 optional second spacer comprises or consists of an alkylenyl spacer which is C1, C2, C3, C4, C5, C6, C7, C8, C9, C10, C11, C12, C13, C14, or C15 (e.g., propylene, butylene, hexylene, C2-C15 alkylene, C2-C10 alkylene, or C2-C6 alkylene). In some aspects, SP3 is a C3 or C6 alkylenyl spacer. In some aspects, the SP4 optional second spacer comprises or consists of an alkylenyl spacer which is C1, C2, C3, C4, C5, C6, C7, C8, C9, C10, C11, C12, C13, C14, or C15 (e.g., propylene, butylene, hexylene, C2-C15 alkylene, C2-C10 alkylene, or C2-C6 alkylene). In some aspects, SP₄ is a C3 or C6 alkylenyl spacer.

[0290] In some aspects, the spacer comprises an substituted or unsubstituted alkenyl, substituted or unsubstituted alkynyl, arylalkyl, arylalkenyl, arylalkynyl, heteroarylalkyl, heteroarylalkenyl, heteroarylalkynyl, heterocyclylalkyl, heterocyclylalkenyl, heterocyclylalkynyl, aryl, heteroaryl, heterocyclyl, cycloalkyl, cycloalkenyl, alkylarylalkyl, alkylarylalkenyl, alkylarylalkynyl, alkenylarylalkyl, alkenylarylalkenyl, alkenylarylalkynyl, alkynylarylalkyl, alkynylarylalkenyl, alkynylarylalkynyl, alkylheteroarylalkyl, alkylheteroarylalkyl, alkylheteroarylalkenyl, alkylheteroarylalkynyl, alkenylheteroarylalkyl, alkenylheteroarylalkenyl, alkenylheteroarylalkynyl, alkynylheteroarylalkyl, alkynylheteroarylalkenyl, alkylheterocyclylalkyl, alkylheterocyclylalkenyl, alkenylheterocyclylalkenyl, or alkenylheterocyclylalkyl, alkynylheteroarylalkynyl, alkylheterocyclylalkynyl, alkenylheterocyclylalkynyl.

[0291] Optionally these spacers are substituted with one or more (e.g., 1, 2, 3, 4, 5, 6, or 7) substituents. Substituents include, for example, hydroxy, alkoxy (e.g., —O—(C₁₋₈ alkyl)), straight or branched chain alkyl (e.g., C₁₋₁₅ alkyl or C₁₋₈ alkyl), amino, aminoalkyl (e.g., C₁-C₁₅ alkylamino), phosphoramidito, phosphato, phosphoramidato, phosphorodithioato, thiophosphato, hydrazido, hydrazino, halo (e.g., F, Cl, Br, or I), aryl, —C(O)R′, —OC(O)R′, —C(O) OR′, —C(O)NH₂, —C(O)NHR′, —C(O)N(R′)₂—, NHC(O)R′, —S(O)₂R′, —S(O)R′, —NH(R′), —N(R′)₂, carboxylic acid halide, ether, sulfonyl halide, imidate ester, isocyanato, isothiocyanato, haloformate, carboduimide adduct, aldehyde, ketone, sulfhydryl, haloacetyl, alkyl halide, alkyl sulfonat, C(═O) CH═CHC(═O) (maleimide), thioether, cyano,nitro, sugar (e.g., mannosyl, galactosyl, and glucosyl), α,β-unsaturated carbonyl, alkyl mercurial, or α,β-unsaturated sulfonyl, where each R′ is independently H, C₁₋₈ alkyl, or aryl.

[0292] Examples of aliphatic linkers include the following structures: —O—CO—O—; —NH—CO—O—; —NH—CO—NH—; —NH—(CH₂)ₙ₁—; —S—(CH₂)ₙ₁—; —CO—(CH₂)ₙ₁—CO—; —CO—(CH₂)ₙ₁—NH—; —NH—(CH₂)ₙ₁—NH—; —CO—NH—(CH₂)ₙ₁—NH—CO—; —C(═S)—NH—(CH₂)ₙ₁—NH—CO—; —C(═S)—NH— (CH₂)ₙ₁—NH—C—(═S)—; —CO—O—(CH₂)ₙ₁—O—CO—; —C(═S)—O— (CH₂)ₙ₁—O—CO—; —C(═S)—O—(CH₂)ₙ₁—O—C—(—S)—; —CO—NH— (CH₂)ₙ₁—O—CO—; —C(═S)—NH— (CH₂)ₙ₁—O— CO—; —C(═S)—NH—(CH₂)ₙ—O—C—(═S)—; —CO—NH— (CH₂)ₙ-O—CO—; —C(═S)—NH—(CH₂)ₙ₁—CO—; —C(═S)—O—(CH₂)ₙ₁—NH—CO—; —C(═S)—NH—(CH₂)ₙ₁—O—C— (═S)—; —NH— (CH₂CH₂O) n2—CH (CH₂OH)—; —NH— (CH₂CH₂O)ₙ₂—CH₂—; —NH—(CH₂CH₂O)ₙ₂—CH₂—CO—; —O—(CH₂)ₙ₃—S—S—(CH₂)ₙ₄—O—P(═O)₂—; —CO— (CH₂)ₙ₃—O—CO—NH—(CH₂)ₙ₄—; —CO—(CH₂)ₙ₃—CO—NH—(CH₂)ₙ₄—; (CH₂)ₙ₁NH—; —C(O)(CH₂)ₙ₁ NH—; —C(O)—(CH₂)ₙ₁-C(O)—; —C(O)(CH₂)ₙ₁—C(O)O—; —C(O)—O—; —C(O)—(CH₂)ₙ₁—NH—C(O)—; —C(O)—(CH₂)ₙ₁—; —C(O)—NH—; —C(O)—; —(CH₂)ₙ₁—C(O)—; —(CH₂)ₙ₁—C(O)O—; —(CH₂)ₙ₁—; —(CH₂)ₙ₁—NH—C(O)—; wherein n1 is an integer between 1 and 15 (e.g., 2 to 15, or 2 to 12); n2 is an integer between 1 and 15 (e.g., 1 to 10, or 1 to 6); n3 and n4 can be the same or different and are each an integer between 1 and 15 (e.g., 1 to 10, or 1 to 6), and wherein the total number of carbon units in the linker is C₁₅ or less.

### Glycol-Based Spacer

[0293] In some aspects, a spacer (e.g., SP₁, SP₂, SP₃, and/or SP₄) in Formula I can comprise a glycol-based spacer. In some aspects, the glycol-based spacer comprises two or more—OCH₂CH₂-repeat units and can be formed from, e.g., diethylene glycol, triethylene glycol, tetraethylene glycol (TEG), pentaethylene glycol, hexaethylene glycol (HEG), heptaethylene glycol, octaethylene glycol, nonaethylene glycol, or decaethylene glycol to provide the corresponding number of —OCH₂CH₂— repeat units. In some aspects, the glycol-based spacer can comprise 11, 12, 13, 14, or 15 glycol-based repeat units (—OCH₂CH₂—). In some aspects, the glycol-based spacer has between 2 and 10, between 2 and 5, between 5 and 10, or between 10 and 15 glycol-based repeat units. In some aspects, the glycol-based spacer is formed from HEG (i.e., 6 glycol repeat units). In some aspects, the glycol-based spacer is formed from TEG (i.e., 4 glycol repeat units).

[0294] In some aspects, the glycol-based spacer can comprise a branched polyglycerol of the formula (R³—O—(CH₂—CHOR⁵—CH₂—O)ₙ—) with R⁵ being hydrogen or a linear glycerol chain of the formula (R³—O—(CH₂—CHOH-CH₂—O)ₙ—) and R³ being hydrogen, methyl or ethyl, and n is an integer of 1 to 15 (e.g., 1, 2, 3, 4, 5, 6, 7, 8, 9, 10, 11, 12, 13, 14, or 15). In some aspects, the glycol-based spacer can comprise a hyperbranched polyglycerol of the formula (R³—O—(CH₂—CHOR⁵—CH₂—O)ₙ—) with R⁵ being hydrogen or a glycerol chain described by the formula (R³—O—(CH₂—CHOR⁶—CH₂—O)ₙ—), with R⁶ being hydrogen or a glycerol chain of the formula (R³—O—(CH₂—CHOR⁷—CH₂—O)ₙ—), with R⁷ being hydrogen or a linear glycerol chain of the formula (R³—O—(CH₂—CHOH-CH₂—O)ₙ—) and R³ being hydrogen, methyl or ethyl. In each instance, n is an integer of 1 to 15 (e.g., 1, 2, 3, 4, 5, 6, 7, 8, 9, 10, 11, 12, 13, 14, or 15). Hyperbranched glycerol and methods of synthesis are described in, for example, Oudshorn et al. (Biomaterials, 2006, 27:5471-5479) and Wilms et al. (Acc. Chem. Res., 2010, 43, 129-41).

[0295] In some aspects, the SPI optional first spacer comprises or consists of a glycol-based spacer which has 2 (diethylene glycol), 3 (triethylene glycol), 4 (tetraethylene glycol; TEG), 5 (pentaethylene glycol), 6 (hexaethylene glycol; HEG), 7, 8, 9, 10, 11, 12, 13, 14, or 15 glycol units. In some aspects, SPI is a tetraethylene glycol (TEG) or hexaethylene glycol (HEG) glycol-based spacer. In some aspects, the SP₂ optional second spacer comprises or consists of a glycol-based spacer which has 2 (diethylene glycol), 3 (triethylene glycol), 4 (tetraethylene glycol; TEG), 5 (pentaethylene glycol), 6 (hexaethylene glycol; HEG), 7, 8, 9, 10, 11, 12, 13, 14, or 15 glycol-based units. In some aspects, SP₂ is a tetraethylene glycol (TEG) or hexaethylene glycol (HEG) glycol-based spacer. In some aspects, the SP₃ optional third spacer comprises or consists of a glycol-based spacer which has 2 (diethylene glycol), 3 (triethylene glycol), 4 (tetraethylene glycol; TEG), 5 (pentaethylene glycol), 6 (hexaethylene glycol; HEG), 7, 8, 9, 10, 11, 12, 13, 14, or 15 glycol units. In some aspects, SP₃ is a tetraethylene glycol (TEG) or hexaethylene glycol (HEG) glycol-based spacer. In some aspects, the SP₄ optional fourth spacer comprises or consists of a glycol-based spacer which has 2 (diethylene glycol), 3 (triethylene glycol), 4 (tetraethylene glycol; TEG), 5 (pentaethylene glycol), 6 (hexaethylene glycol; HEG), 7, 8, 9, 10, 11, 12, 13, 14, or 15 glycol units. In some aspects, SP₄ is a tetraethylene glycol (TEG) or hexaethylene glycol (HEG) glycol-based spacer.

[0296] In some aspects, the SPI and SP₂ spacers can comprise an alkylenyl spacer and the SP₃ spacer can comprise a glycol-based spacer. In some aspects, the SP₂ and SP₃ spacers can comprise an alkylenyl spacer and the SPI spacer can comprise a glycol-based spacer. In some aspects, the SP₂ and SP₃ spacers can comprise an alkylenyl spacer and the SPI and SP₄ spacers are absent.

[0297] In some aspects, each non-cleavable spacer is independently selected from the group consisting of alkyl (e.g., C2, C3, C4, C5, C6, C7 or C8), glycol (e.g., diethylene glycol, triethylene glycol, tetraethylene glycol (TEG), hexaethylene glycol (HEG), pentaethylene glycol, polyethylene glycol (PEG)), glycerol (e.g., diglycerol, triglycerol, tetraglycerol (TG), pentaglycerol, a hexaglycerol (HG), polyglycerol (PG)), succinimide, maleimide, or any combination thereof.

### Polyethylene Glycol Spacer

[0298] In some aspects, a spacer (e.g., SP₁, SP₂, SP₃, and/or SP₄) in Formula I or II can comprise or consist of a glycol-based spacer that can be considered a polyethylene glycol (PEG) residue of the formula —(O—CH₂—CH₂)ₙ— or —(O—CH₂—CH₂)ₙ—O—, wherein n is an integer between 1 and 200 (e.g., 1, 2, 3, 4, 5, 6, 7, 8, 9, 10, 11, 12, 13, 14, 15, 20, 25, 30, 35, 40, 45, 50, 55, 60, 65, 70, 75, 80, 85, 90, 95, 100, 105, 110, 115, 120, 125, 130, 135, 140, 145, 150, 155, 160, 165, 170, 175, 180, 185, 190, 195, or 200). These PEG can be described as PEG₁, PEG₂, PEG₃, PEG₄, PEG₅, PEG₆, PEG₇, PEG₈, PEG₉, PEG₁₀, PEG₁₁, PEG₁₂, PEG₁₃, PEG₁₄, PEG₁₅, PEG₂₅, PEG₅₀, PEG_{75,} PEG₁₀₀, PEG₁₂₅, PEG₁₅₀, PEG₁₇₅, PEG₂₀₀, or PEGI-O—, PEG₂-O—, PEG₃-O—, PEG+—O—, PEG₅-O—, PEG₆-O—, PEG₇-O—, PEG₈-O—, PEG₉-O—, PEG₁₀-O—, PEG₁₁-O—, PEG₁₂-O—, PEG₁₃-O—, PEG₁₄-O—, PEG₁₅-O—, PEG₂₅-O—, PEG₅₀-O—, PEG₇₅-O—, PEG₁₀₀-O—, PEG₁₂₅-O—, PEG₁₅₀-O—, PEG₁₇₅-O—, or PEG₂₀₀-O—. Prior to conjugation to another moiety (e.g., AM or BAM) that forms the construct of Formula I or II, the PEG residue can be formed from R¹—(O—CH₂—CH₂)ₙ-R¹ or R¹—(O—CH₂—CH₂) n—OR1, wherein R¹ is hydrogen, methyl, or ethyl and n is an integer between 1 and 200 (e.g., 1, 2, 3, 4, 5, 6, 7, 8, 9, 10, 11, 12, 13, 14, 15, 20, 25, 30, 35, 40, 45, 50, 55, 60, 65, 70, 75, 80, 85, 90, 95, 100, 105, 110, 115, 120, 125, 130, 135, 140, 145, 150, 155, 160, 165, 170, 175, 180, 185, 190, 195, or 200).

[0299] In some aspects, the PEG is a branched PEG. Branched PEGs have three to ten PEG chains emanating from a central core group. In certain aspects, the PEG moiety is a monodisperse polyethylene glycol. In the context of the present disclosure, a monodisperse polyethylene glycol (mdPEG) is a PEG that has a single, defined chain length and molecular weight.

[0300] In some aspects, the PEG is a star PEG. Star PEGs have about 10 to 15 PEG chains emanating from a central core group. In some aspects, the PEG is a comb PEGs. Comb PEGs have multiple PEG chains normally grafted onto a polymer backbone.

[0301] In some aspects, a spacer (e.g., SP₁, SP₂, SP₃, and/or SP₄) in Formula I can comprise or consist of a polyglycerol (PG) residue characterized by the formula —O—(CH₂—CHOH—CH₂O)ₙ—, wherein n is an integer between 1 and 15 (e.g., 1, 2, 3, 4, 5, 6, 7, 8, 9, 10, 11, 12, 13, 14 or 15). These polyglycerol residues can be described as PG₁, PG₂, PG₃, PG₄, PG₅, PG₆, PG₇, PG₈, PG₉, PG₁₀, PG₁₁, PG₁₂, PG₁₃, PG₁₄, or PG₁₅.

[0302] In some aspects, the anchoring moiety AM comprises or consists of a vitamin, as described herein, and an alkylenyl spacer. In some aspects, the anchoring moiety AM comprises or consists of tocopherol and an alkylenyl spacer. In some aspects, the anchoring moiety AM comprises or consists of a vitamin and an octyl (C8) alkylenyl spacer, such as tocopherol and an octyl (C8) alkylenyl spacer.

[0303] In some aspects, the anchoring moiety AM comprises or consists of a fatty acid and an alkylenyl spacer. In some aspects, the anchoring moiety AM comprises or consists of a palmitate and an alkylenyl spacer. In some aspects, the anchoring moiety AM comprises or consists of a fatty acid and a hexyl (C6) alkylenyl spacer, such as palmitate and a hexyl (C6) alkylenyl spacer. . . . In some aspects, the anchoring moiety AM comprises or consists of dipalmitoylphosphatidic acid and an alkylenyl spacer.

[0304] In some aspects, the anchoring moiety AM comprises or consists of a sterol and a glycol-based spacer. In some aspects, the anchoring moiety AM comprises or consists of cholesterol and a glycol-based spacer. In some aspects, the anchoring moiety AM comprises or consists of a sterol and a TEG glycol-based spacer, such as cholesterol and a TEG glycol-based spacer. In some aspects, the anchoring moiety AM comprises or consists of a sterol and an alkylenyl spacer. In some aspects, the anchoring moiety AM comprises or consists of a sterol and a hexyl (C6) alkylenyl spacer. In some aspects, the anchoring moiety AM comprises or consists of cholesterol and an alkylenyl spacer, such as cholesterol and a hexyl (C6) alkylenyl spacer.

### Non-cleavable Linkers

[0305] In some aspects, the linker combination comprises a “non-cleavable linkage,” which is a linker and/or spacer that that includes chemical bonds that are substantially resistant to cleavage. Non-cleavable linkers are substantially resistant to, for example, acid-induced cleavage, photo-induced cleavage, peptidase-induced cleavage, esterase-induced cleavage, and disulfide bond cleavage, particularly at conditions under which a cyclic dinucleotide and/or the antibody does not lose its activity. Non-cleavable linkers are any chemical moiety capable of linking two or more components of a construct disclosed herein, e.g., a construct of Formula I or II. In particular, the non-cleavable linker can link any two parts of the construct, e.g., the anchoring moiety AM and/or a spacer SP and/or the biologically active molecule BAM. Typically, the non-cleavable linker is part of a spacer (e.g., SP₁, SP₂, SP₃, and/or SP₄), as described herein, but in some aspsects, the AM or BAM is modified to include the non-cleavable linkage.

[0306] In some aspects, the linker combination comprises a non-cleavable linker comprising, e.g., tetraethylene glycol (TEG), hexaethylene glycol (HEG), polyethylene glycol (PEG), glycerol, C2 to C12 alkyl, succinimidyl, or any combination thereof. In some aspects, the non-cleavable linkage comprises a spacer, as described herein, to link the AM and/or BAM to the non-cleavable linkage.

### Biologically Active Molecule

[0307] The biologically active molecule BAM is an agent that acts on a target (e.g., a target cell). Contacting can occur in vitro or in a subject. Non-limiting examples of biologically active molecules BAM that can attached to an EV (e.g., exosome) as described in the present disclosure include agents such as polynucleotides (e.g., nucleotides comprising a detectable moiety or a toxin or that disrupt transcription), nucleic acids (e.g., DNA or mRNA molecules that encode a polypeptide such as an enzyme, or RNA molecules that have regulatory function such as miRNA, dsDNA, lncRNA, mRNA, siRNA, shRNA, or an antisense oligonucleotide (ASO)), amino acids (e.g., amino acids comprising a detectable moiety or a toxin that disrupt translation), polypeptides (e.g., enzymes), lipids, carbohydrates, and small molecules (e.g., small molecule drugs and toxins), an antimirs, an RNA decoy, or any combination thereof. In some aspects, the BAM comprises a peptide, a polypeptidyl, a polynucleotidyl, a protein, an antibody or an antigen binding fragment thereof, a chemical compound, or any combination thereof. In some aspects, the BAM comprises an antisense oligonucleotidyl (ASO), siRNA, miRNA, shRNA, a nucleic acid, or any combination thereof.

[0308] In some aspects, an EV (e.g., exosome) disclosed herein can comprise more than one biologically active molecule BAM attached, e.g., using the constructs disclosed herein. For example, in some aspects, the EV (e.g., exosome) can comprise multiple populations of constructs of the present disclosure (e.g., a construct of Formula I or II), wherein each population of constructs carry a different biologically active molecule BAM.

[0309] Accordingly, in some aspects a population of EVs, e.g., exosomes, of the present disclosed can comprise a plurality of construct as exemplified below.

[chemical structure]

wherein [AM₁] . . . [AMₙ] can be the same or different anchoring moieties, each SP₁, L₁, and SP₂ can be the same or different, and [BAM₁]. [BAMₙ] can be the same of different biologically active molecules.

[0310] In some aspects, the biologically active molecule BAM comprises or consists of a peptide, a protein, an antibody or an antigen binding portion thereof, or any combination thereof. In some aspects, the antigen binding portion thereof comprises scFv, (scFv) 2, Fab, Fab′, F(ab′)₂, F(ab1)2, Fv, dAb, and Fd fragment, diabodys, antibody-related polypeptide, or any fragment thereof. In some aspects, the antibody or antigen binding portion thereof can bind to a Protein X protein present in the membrane of the EV (e.g., exosome).

[0311] In some aspects, the biologically active molecule BAM targets a tumor antigen. Non-limiting examples of tumor antigens include: alpha-fetoprotein (AFP), carcinoembryonic antigen (CEA), epithelial tumor antigen (ETA), mucin 1 (MUC1), Tn-MUC1, mucin 16 (MUC16), tyrosinase, melanoma-associated antigen (MAGE), tumor protein p53 (p53), CD4, CD8, CD45, CD80, CD86, programmed death ligand 1 (PD-L₁), programmed death ligand 2 (PD-L₂), NY-ESO-1, PSMA, TAG-72, HER2, GD2, cMET, EGFR, Mesothelin, VEGFR, alpha-folate receptor, CE7R, IL-3, Cancer-testis antigen (CTA), MART-1 gp100, TNF-related apoptosis-inducing ligand, or combinations thereof.

[0312] In some aspects, the biologically active molecule BAM is a targeting moiety, e.g., an antibody or binding portion thereof or a ligand that specifically binds to a marker on a muscle cell. In some aspects, the muscle cell is a smooth muscle cell. In some aspects, the muscle cell is a skeletal muscle cell. In some aspects, the muscle cell is a cardiac muscle cell. In some aspects, the marker on the muscle cell is selected from alpha-smooth muscle actin, VE-cadherin, caldesmon/CALDI, calponin 1, hexim 1, histamine H2 R; motilin R/GPR38, transgelin/TAGLN, and any combination thereof. In some aspects, the marker on the muscle cell is selected from alpha-sarcoglycan, beta-sarcoglycan, calpain inhibitors, creatine kinase MM/CKMM, eIF5A, enolase 2/neuron-specific enolase, epsilon-sarcoglycan, FABP3/H-FABP, GDF-8/Myostatin, GDF-11/GDF-8, integrin alpha 7, integrin alpha 7 beta 1, integrin beta 1/CD29, MCAM/CD146, MyoD, myogenin, myosin light chain kinase inhibitors, NCAM-1/CD56, troponin I, and any combination thereof. In some aspects, the marker on the muscle cell is myosin heavy chain, myosin light chain, or a combination thereof.

[0313] In some aspects, the biologically active molecule BAM is a small molecule. In some aspects, the small molecule is a proteolysis-targeting chimera (PROTAC). In some aspects, the biologically active molecule BAM is a small molecule comprising a synthetic antineoplastic agent (e.g., monomethyl auristatin E (MMAE)(vedotin)), a cytokine release inhibitor (e.g., MCC950), an mTOR inhibitor (e.g., rapamycin and its analogs (rapalogs)), an autotaxin inhibitor (e.g., PAT409 or PAT505), a lysophosphatidic acid receptor agonist (e.g., BMS—986020), a STING antagonist (e.g., CL656), or any combination thereof. In some aspects, a biologically active molecule BAM comprises a morpholino backbone structure as disclosed in U.S. Pat. No. 5,034,506, which is herein incorporated by reference in its entirety.).

[0314] In some aspects, the biologically active molecule BAM comprises a nucleotide, wherein the nucleotide is a stimulator of interferon genes protein (STING) agonist. STING is a cytosolic sensor of cyclic dinucleotides that is typically produced by bacteria. Upon activation, it leads to the production of type I interferons and initiates an immune response

[0315] In some aspects, the STING agonist comprises a cyclic nucleotide STING agonist or a non-cyclic dinucleotide STING agonist. Cyclic purine dinucleotides (CDN) such as, but not limited to, cGMP, cyclic di-GMP (c-di-GMP), cAMP, cyclic di-AMP (c-di-AMP), cyclic-GMP-AMP (cGAMP), cyclic di-IMP (c-di-IMP), cyclic AMP-IMP (cAIMP), and any analogue thereof, are known to stimulate or enhance an immune or inflammation response in a patient. The CDNs can have 2′2′, 2′3′, 2′5′, 3′3′, or 3′5′, bonds linking the cyclic dinucleotides, or any combination thereof. Cyclic purine dinucleotides can be modified via standard organic chemistry techniques to produce analogues of purine dinucleotides. Suitable purine dinucleotides include, but are not limited to, adenine, guanine, inosine, hypoxanthine, xanthine, isoguanine, or any other appropriate purine dinucleotide known in the art. The cyclic dinucleotides can be modified analogues. Any suitable modification known in the art can be used, including, but not limited to, phosphorothioate, biphosphorothioate, fluorinate, and difluorinate modifications. Non-cyclic dinucleotide agonists can also be used, such as 5,6-dimethylxanthenone-4-acetic acid (DMXAA), or any other non-cyclic dinucleotide agonist known in the art.

[0316] It is contemplated that any STING agonist can be used as the biologically active molecule BAM. STING agonists include DMXAA, STING agonist-1, ML RR-S2 CDA, ML RR-S2c-di-GMP, ML-RR-S2 cGAMP, 2′3′-c-di-AM (PS) 2, 2′3′-cGAMP, 2′3′-cGAMPdFHS, 3′3′-cGAMP, 3′3′-cGAMPdFSH, cAIMP, cAIM (PS) 2, 3′3′-cAIMP, 3′3′-cAIMPdFSH, 2′2′-cGAMP, 2′3′-cGAM (PS) 2, 3′3′-cGAMP, c-di-AMP, 2′3′-c-di-AMP, 2′3′-c-di-AM (PS) 2, c-di-GMP, 2′3′-c-di-GMP, c-di-IMP, c-di-UMP or any combination thereof. In a specific aspect, the STING agonist is 3′3′-cAIMPdFSH, alternatively named 3-3 cAIMPdFSH. Additional STING agonists known in the art can also be used.

[0317] In some aspects, the biologically active molecule BAM is an antibody or antigen binding fragment thereof. In some aspects, the biologically active molecule BAM is an antibody-drug conjugate (ADC). In some aspects, the biologically active molecule BAM is a fusogenic peptide.

[0318] In some aspects, the biologically active molecule BAM targets macrophages. In other aspects, the biologically active molecule induces macrophage polarization. Macrophage polarization is a process by which macrophages adopt different functional programs in response to the signals from their microenvironment. This ability is connected to their multiple roles in the organism: they are powerful effector cells of innate immune system, but also important in removal of cellular debris, embryonic development and tissue repair.

[0319] By simplified classification, macrophage phenotype has been divided into 2 groups: Ml (classically activated macrophages) and M2 (alternatively activated macrophages). This broad classification was based on in vitro studies, in which cultured macrophages were treated with molecules that stimulated their phenotype switching to particular state. In addition to chemical stimulation, it has been shown that the stiffness of the underlying substrate a macrophage is grown on can direct polarization state, functional roles and migration mode. MI macrophages were described as the pro-inflammatory type, important in direct host-defense against pathogens, such as phagocytosis and secretion of pro-inflammatory cytokines and microbicidal molecules. M2 macrophages were described to have quite the opposite function: regulation of the resolution phase of inflammation and the repair of damaged tissues. Later, more extensive in vitro and ex vivo studies have shown that macrophage phenotypes are much more diverse, overlapping with each other in terms of gene expression and function, revealing that these many hybrid states form a continuum of activation states which depend on the microenvironment. Moreover, in vivo, there is a high diversity in gene expression profile between different populations of tissue macrophages. Macrophage activation spectrum is thus considered to be wider, involving complex regulatory pathway to response to plethora of different signals from the environment. The diversity of macrophage phenotypes still remains to be fully characterized in vivo.

[0320] The imbalance of the macrophage types is related to a number of immunity-related diseases. For example, increased M1/M2 ratio may correlate with development of inflammatory bowel disease, as well as obesity in mice. On the other side, in vitro experiments implicated M2 macrophages as the primary mediators of tissue fibrosis. Several studies have associated the fibrotic profile of M2 macrophages with the pathogenesis of systemic sclerosis. Non-limiting examples of the macrophage targeting biologically active molecules are: PI3KY (phosphatidylinositol-4,5-bisphosphate 3-kinase catalytic subunit gamma), RIPI (Receptor Interacting Protein (RIP) kinase 1, RIPK1), HIF-1α (Hypoxia-inducible factor 1-alpha), AHR1 (Adhesion and hyphal regulator 1), miR146a, miR155, IRF4 (Interferon regulatory factor 4), PPARγ (Peroxisome proliferator -activated receptor gamma), IL-4RA (Interleukin-4 receptor subunit alpha), TLR8 (Toll-like receptor 8), and TGF-β1 (Transforming growth factor beta-1 proprotein)

[0321] In some aspects, the biologically active molecule BAM comprises or consists of an antisense oligonucleotide (ASO). In some aspects, the ASO is a gapmer, a mixmer, or a totalmer. In some aspects, the ASO can target pre-mRNA or a mature mRNA, including protein coding regions (exons), non coding regions (e.g., 5′ or 3′ unstranslated regions, or introns), intron-exon junctions, or regulatory regions (e.g., promoters). In some aspects, the ASO targets a protein transcript, e.g., a STAT6 transcript, an EGFP transcript, a CEBP/β transcript, a STAT3 transcript, a KRAS transcript, an NRAS transcript, an NLPR3 transcript, an FFLUC transcript, an RLUC transcript, a MYC transcript, or any combination thereof.

[0322] In some aspects, the ASO can comprise one or more nucleosides which have a modified sugar moiety, i.e., a modification of the sugar moiety when compared to the ribose sugar moiety found in DNA and RNA. Numerous nucleosides with modification of the ribose sugar moiety have been made, primarily with the aim of improving certain properties of oligonucleotides, such as affinity and/or nuclease resistance. Such modifications include those in which the ribose ring structure has been modified, e.g., by replacement with a hexose ring (HNA), a bicyclic ring, which typically has a biradical bridge between the C2′ and C4′ carbons on the ribose ring (LNA), or an unlinked ribose ring which typically lacks a bond between the C2′ and C3′ carbons (e.g., UNA). Other sugar modified nucleosides include, for example, bicyclohexose nucleic acids (WO2011/017521) or tricyclic nucleic acids (WO2013/154798). Modified nucleosides also include nucleosides where the sugar moiety is replaced with a non-sugar moiety, for example in the case of peptide nucleic acids (PNA), or morpholino nucleic acids.

[0323] Sugar modifications also include modifications made via altering the substituent groups on the ribose ring to groups other than hydrogen, or the 2′—OH group naturally found in RNA nucleosides. Substituents can, for example, be introduced at the 2′, 3′, 4′, and/or 5′ positions. Nucleosides with modified sugar moieties also include 2′ modified nucleosides, such as 2′ substituted nucleosides. A 2′ sugar modified nucleoside is a nucleoside which has a substituent other than H or -OH at the 2′ position (2′ substituted nucleoside) or comprises a 2′ linked biradical, and includes 2′ substituted nucleosides and LNA (2′-4′ biradical bridged) nucleosides. For example, the 2′ modified sugar can provide enhanced binding affinity (e.g., affinity enhancing 2′ sugar modified nucleoside) and/or increased nuclease resistance to the oligonucleotide. Examples of 2′ substituted modified nucleosides are 2′-O-alkyl-RNA, 2′-O-methyl-RNA, 2′-alkoxy-RNA, 2′—O-methoxyethyl-RNA (MOE), 2′-amino-DNA, 2′-fluoro-RNA, 2′-fluoro-DNA, arabino nucleic acids (ANA), and 2′-fluoro-ANA nucleoside. Further examples are provided in Freier & Altmann; Nucl. Acid Res., 1997, 25, 4429-4443; Uhlmann, Curr. Opinion in Drug Development, 2000, 3 (2), 293-213; and Deleavey and Damha, Chemistry and Biology 2012, 19, 937. Below are illustrations of some 2′ substituted modified nucleosides.

[chemical structure]

[0324] LNA nucleosides are modified nucleosides which comprise a linker group (referred to as a biradical or a bridge) between C₂′ and C₄′ of the ribose sugar ring of a nucleoside (i.e., 2′-4′ bridge), which restricts or locks the conformation of the ribose ring. These nucleosides are also termed bridged nucleic acid or bicyclic nucleic acid (BNA). The locking of the conformation of the ribose is associated with an enhanced affinity of hybridization (duplex stabilization) when the LNA is incorporated into an oligonucleotide for a complementary RNA or DNA molecule. This can e routinely determined by measuring the melting temperature of the oligonucleotide/complement duplex.

[0325] Non limiting, exemplary LNA nucleosides are disclosed in WO99/014226, WO00/66604, WO98/039352, WO2004/046160, WO00/047599, WO2007/134181, WO2010/077578, WO2010/036698, WO2007/090071, WO2009/006478, WO2011/156202, WO2008/154401, WO2009/067647, WO2008/150729, Morita et al., Bioorganic & Med. Chem. Lett., 12, 73-76, Seth et al., J. Org. Chem., 2010, Vol 75 (5) pp. 1569-81, or Mitsuoka et al., Nucleic Acids Research, 2009, 37 (4), 1225-1238, all of which are herein incorporated by reference in their entireties. In some aspects, the modified nucleoside or the LNA nucleosides of an ASO of the disclosure has a general structure of the Formula X or Formula XI:

[chemical structure]

wherein
[0326] B is a nucleobase or a modified nucleobase moiety;
[0327] W is selected from —O—, —S—, —N(R^{a})—, —C(R^{a}R^{b})—, in particular —O—;
[0328] X is O;
[0329] Y is CH₂;
[0330] Z is an internucleoside linkage to an adjacent nucleoside or a 5′-terminal group;
[0331] Z* is an internucleoside linkage to an adjacent nucleoside or a 3′-terminal group;
[0332] R¹, R², R³, R⁵ and R⁵* are independently selected from hydrogen, halogen, alkyl, alkenyl, alkynyl, hydroxy, alkoxy, alkoxyalkyl, alkenyloxy, carboxyl, alkoxycarbonyl, alkylcarbonyl, formyl, azide, heterocyclyl, and aryl; and
[0333] R^{a} and R^{b} are independently selected from hydrogen and alkyl.

### ASO Targeting NLRP3

[0334] In some aspects, the biologically active molecule BAM is an anti-NLRP3 ASO. NLRP3 (NLRP3) is also known as NLR family pyrin domain containing 3. Unless indicated otherwise, the term “NLRP3,” as used herein, can refer to NLRP3 from one or more species (e.g., humans, non-human primates, dogs, cats, guinea pigs, rabbits, rats, mice, horses, cattle, and bears). The sequence for the human NLRP3 gene can be found under publicly available GenBank Accession Number NC_000001.11:247416156-247449108. The human NLRP3 gene is found at chromosome location 1q44 at 247,416,156-247,449,108. The sequence for the human NLRP 3 pre-mRNA transcript (SEQ ID NO: 1) corresponds to the reverse complement of residues 247,416,156-247,449,108 of chromosome 1q44. The NLRP3 mRNA sequence (GenBank Accession No.

[0335] NM_001079821.2) is provided in SEQ ID NO: 3, except that the nucleotide “t” in SEQ ID NO: 3 is shown as “u” in the mRNA. The sequence for human NLRP3 protein can be found under publicly available Accession Numbers: Q96P20, (canonical sequence, SEQ ID NO: 2), Q96P20-2 (SEQ ID NO: 4), Q96P20-3 (SEQ ID NO: 5), Q96P20-4 (SEQ ID NO: 6), Q96P20-5 (SEQ ID NO: 7), and Q96P20-6 (SEQ ID NO: 8), each of which is incorporated by reference herein in its entirety. The anti-NLRP3 ASOs of the present disclosure can be designed to reduce or inhibit expression of the natural variants of the NLRP3 protein.

[0336] An example of a target nucleic acid sequence of the anti-NLRP3 ASOs is NLRP3 pre-mRNA. SEQ ID NO: 1 represents a human NLRP3 genomic sequence (i.e., reverse complement of nucleotides 247,416,156-247,449,108 of chromosome 1q44). SEQ ID NO: 1 is identical to a NLRP3 pre-mRNA sequence except that nucleotide “t” in SEQ ID NO: 1 is shown as “u” in pre-mRNA. In certain aspects, the “target nucleic acid” comprises an intron of a NLRP3 protein-encoding nucleic acids or naturally occurring variants thereof, and RNA nucleic acids derived therefrom, e.g., pre-mRNA. In other aspects, the target nucleic acid comprises an exon region of a NLRP3 protein-encoding nucleic acids or naturally occurring variants thereof, and RNA nucleic acids derived therefrom, e.g., pre-mRNA. In yet other aspects, the target nucleic acid comprises an exon-intron junction of a NLRP3 protein-encoding nucleic acids or naturally occurring variants thereof, and RNA nucleic acids derived therefrom, e.g., pre-mRNA. The human NLRP3 protein sequence encoded by the NLRP3 pre-mRNA is shown as SEQ ID NO: 3. In other aspects, the target nucleic acid comprises an untranslated region of a NLRP3 protein-encoding nucleic acids or naturally occurring variants thereof, e.g., 5′ UTR, 3′ UTR, or both.

[0337] In some aspects, an anti-NLRP3 ASO of the disclosure hybridizes to a region within the introns of a NLRP3 transcript, e.g., SEQ ID NO: 1. In certain aspects, an anti-NLRP3 ASO of the disclosure hybridizes to a region within the exons of a NLRP3 transcript, e.g., SEQ ID NO: 1. In other aspects, an anti-NLRP3 ASO of the disclosure hybridizes to a region within the exon-intron junction of a NLRP3 transcript, e.g., SEQ ID NO: 1. In some aspects, an anti-NLRP3 ASO of the disclosure hybridizes to a region within a NLRP3 transcript (e.g., an intron, exon, or exon-intron junction), e.g., SEQ ID NO: 1, wherein the anti-NLRP3 ASO has a gapmer design.

[0338] In some aspects, the anti-NI.RP3 ASO targets an mRNA encoding a particular isoform of NLRP3 protein (e.g., Isoform 1). In some aspects, the anti-NLRP3 ASO targets all isoforms of NLRP3 protein. In other aspects, the anti-NLRP3 ASO targets two isoforms (e.g., Isoform 1 and Isoform 2, Isoform 3 and Isoform 4, and Isoform 5 and Isoform 6) of NLRP3 protein.

[0339] In some aspects, the nucleotide sequence of the anti-NLRP3 ASOs of the disclosure or the contiguous nucleotide sequence has at least 80% sequence identity to a sequence selected from SEQ ID NOs: 101 to 200, such as at least 80%, at least 85%, at least 90%, at least 91%, at least 92%, at least 93%, at least 94%, at least 95%, at least 96% sequence identity, at least 97% sequence identity, at least 98% sequence identity, at least 99% sequence identity, such as about 100% sequence identity (homologous).

[0340] In some aspects, the anti-NI.RP3 ASO (or contiguous nucleotide portion thereof) is selected from, or comprises, one of the sequences selected from the group consisting of SEQ ID NOs: 101 to 200 or a region of at least 10 contiguous nucleotides thereof, wherein the anti-NLRP3 ASO (or contiguous nucleotide portion thereof) can optionally comprise one, two, three, or four mismatches when compared to the corresponding NLRP3 transcript.

[0341] In some aspects, the anti-NLRP3 ASO comprises a sequence selected from the group consisting of SEQ ID NO: 101-200.

[0342] In some aspects, the anti-NLRP3 ASO comprises a sequence as set forth in any one of SEQ ID NOs: 101 to 200. In some aspects, the anti-NLRP3 ASO comprises or consists of a sequence at least 60%, at least 65%, at least 70%, at least 75%, at least 80%, at least 85%, at least 90%, at least 95%, at least 96%, at least 97%, at least 98%, at least 99%, or about 100% identical to a sequence set forth in SEQ ID NOs: 101 to 200. In some aspects, the anti-NLRP3 ASO (or contiguous nucleotide portion thereof) is selected from, or comprises, one of the sequences selected from the group consisting of SEQ ID NOs: 101 to 200 or a region of at least 8, 9, 10, 11, 12, 13, 14, 15, 16, 17, 18, 19, or 20 contiguous nucleotides thereof. In some aspects, the anti-NLRP3 ASO (or contiguous nucleotide portion thereof) is selected from, or comprises, one of the sequences selected from the group consisting of SEQ ID NOs: 101 to 200 or a region of at least 8, 9, 10, 11, 12, 13, 14, 15, 16, 17, 18, 19, or 20 contiguous nucleotides thereof, wherein the anti-NLRP3 ASO (or contiguous nucleotide portion thereof) can optionally comprise one, two, three, or four mismatches when compared to the corresponding NI.RP3 transcript. In some aspects, the anti-NLRP3 ASO (or contiguous nucleotide portion thereof) is selected from, or comprises, one of the sequences selected from the group consisting of SEQ ID NOs: 101 to 200 except for 1, 2, 3, 4, 5, 6, 7, 8, 9 or 10 substitutions, wherein the substituted ASO can bind to the NLRP3 transcript. In some aspects, the anti-NLRP3 ASO (or contiguous nucleotide portion thereof) is selected from, or comprises, one of the sequences selected from the group consisting of SEQ ID NOs: 101 to 200 or a region of at least 8, 9, 10, 11, 12, 13, 14, 15, 16, 17, 18, 19, or 20 contiguous nucleotides thereof, wherein the anti-NLRP3 ASO (or contiguous nucleotide portion thereof) can optionally comprise one, two, three, or four additional 5′ and/or 3′ nucleotides complementary to the corresponding NLRP3 transcript.

[0343] In some aspects, binding of an anti-NLRP3 ASO targeting a NLRP3 transcript disclosed herein to an mRNA transcript encoding NLRP3 can reduce expression levels and/or activity levels of NLRP3.

[0344] In some aspects, any anti-NLRP3 ASO described herein can be part of an EV (e.g., exosome) of the present disclosure, i.e., an EV (e.g., exosome) a comprising construct comprising a cleavable linker disclosed herein, e.g., a construct of Formula I or II in which the biologically active moiety BAM is an anti-NLRP3 ASO described herein or a combination thereof.

### ASO Targeting STAT6

[0345] In some aspects, the biologically active molecule BAM is an anti-STAT6 ASO. STAT6 (STAT6) is also known as signal transducer and activator of transcription 6. Unless indicated otherwise, the term “STAT6,” as used herein, can refer to STAT6 from one or more species (e.g., humans, non-human primates, dogs, cats, guinea pigs, rabbits, rats, mice, horses, cattle, and bears).

[0346] The sequence for the human STAT6 pre-mRNA transcript (SEQ ID NO: 11) corresponds to the reverse complement of residues 57111413-57095404, complement, of chromosome 12q13.3. The STAT6 mRNA sequence (GenBank Accession No. NM_001178078.1) is provided in SEQ ID NO: 13, except that the nucleotide “t” in SEQ ID NO: 13 is shown as “u” in the mRNA. The sequence for human STAT6 protein can be found under publicly available Accession Numbers: P42226-1, (canonical sequence, SEQ ID NO: 12), P42226-2 (SEQ ID NO: 14), and P42226-3 (SEQ ID NO: 15), each of which is incorporated by reference herein in its entirety.

[0347] Natural variants of the human STAT6 gene product are known. For example, natural variants of human STAT6 protein can contain one or more amino acid substitutions selected from: M118R, D₄₁₉N, and any combination thereof. Additional variants of human STAT6 protein resulting from alternative splicing are also known in the art. STAT6 Isoform 2 (identifier: P42226-2 at UniProt) differs from the canonical sequence (SEQ ID NO: 13) as follows: deletion of residues 1-174 and substitution of 175PSE177 with 175MEQ177 relative to SEQ ID NO: 13. The sequence of STAT6 Isoform 3 (identifier: P42226-3) differs from the canonical sequence (SEQ ID NO: 13) as follows: deletion of residues 1-110 relative to SEQ ID NO: 13. Therefore, the anti-STAT6 ASOs of the present disclosure can be designed to reduce or inhibit expression of the natural variants of the STAT6 protein.

[0348] An example of a target nucleic acid sequence of the anti-STAT6 ASOs is STAT6 pre-mRNA. SEQ ID NO: 11 represents a human STAT6 genomic sequence (i.e., reverse complement of nucleotides 57111413-57095404, complement, of chromosome 12q13.3). SEQ ID NO: 11 is identical to a STAT6 pre-mRNA sequence except that nucleotide “t” in SEQ ID NO: 11 is shown as “u” in pre-mRNA. In certain aspects, the “target nucleic acid” comprises an intron of a STAT6 protein-encoding nucleic acids or naturally occurring variants thereof, and RNA nucleic acids derived therefrom, e.g., pre-mRNA. In other aspects, the target nucleic acid comprises an exon region of a STAT6 protein-encoding nucleic acids or naturally occurring variants thereof, and RNA nucleic acids derived therefrom, e.g., pre-mRNA. In yet other aspects, the target nucleic acid comprises an exon-intron junction of a STAT6 protein-encoding nucleic acids or naturally occurring variants thereof, and RNA nucleic acids derived therefrom, e.g., pre-mRNA. The human STAT6 protein sequence encoded by the STAT6 pre-mRNA is shown as SEQ ID NO: 13. In other aspects, the target nucleic acid comprises an untranslated region of a STAT6 protein-encoding nucleic acids or naturally occurring variants thereof, e.g., 5′ UTR, 3′ UTR, or both.

[0349] In some aspects, an anti-STAT6 ASO of the disclosure hybridizes to a region within the introns of a STAT6 transcript, e.g., SEQ ID NO: 11. In certain aspects, an anti-STAT6 ASO of the disclosure hybridizes to a region within the exons of a STAT6 transcript, e.g., SEQ ID NO: 11. In other aspects, an anti-STAT6 ASO of the disclosure hybridizes to a region within the exon-intron junction of a STAT6 transcript, e.g., SEQ ID NO: 11. In some aspects, an anti-STAT6 ASO of the disclosure hybridizes to a region within a STAT6 transcript (e.g., an intron, exon, or exon-intron junction), e.g., SEQ ID NO: 11, wherein the anti-STAT6 ASO has a gapmer design.

[0350] In some aspects, the anti-STAT6 ASO targets an mRNA encoding a particular isoform of STAT6 protein (e.g., Isoform 1). In some aspects, the ASO targets all isoforms of STAT6 protein. In other aspects, the anti-STAT6 ASO targets two isoforms (e.g., Isoform 1 and Isoform 2, Isoform 1 and Isoform 3, or Isoform 2 and Isoform 3) of STAT6 protein.

[0351] In some aspects, a payload of the disclosure (e.g., ASO) hybridizes to a region within the introns of a STAT6 transcript. In certain aspects, the payload hybridizes to a region within the exons of a STAT6 transcript. In some aspects, the payload hybridizes to a region within the exon-intron junction of a STAT6 transcript. In some aspects, the payload hybridizes to a region within a STAT6 transcript (e.g., an intron, exon, or exon-intron junction). A non-limiting example of a payload (e.g., ASO) that can specifically target a region of a STAT6 transcript.

[0352] In some aspects, binding of an anti-STAT6 ASO targeting a STAT6 transcript disclosed herein to an mRNA transcript encoding STAT6 can reduce expression levels and/or activity levels of STAT6.

[0353] In some aspects, any anti-STAT6 ASO described herein can be part of an EV (e.g., exosome) of the present disclosure, i.e., an EV (e.g., exosome) a comprising construct comprising a cleavable linker disclosed herein, e.g., a construct of Formula I or II in which the biologically active moiety BAM is an anti-STAT6 ASO described herein or a combination thereof.

[0354] In some aspects, an anti-STAT6 ASO of the present disclosure comprises the base sequence of SEQ ID NO: 1091. In some aspects, an anti-STAT6 ASO of the present disclosure comprises the STAT 6 ASO sequence shown in FIG. 2.

### ASO Targeting MYC

[0355] In some aspects, the biologically active molecule BAM is an anti MYCASO. Unless indicated otherwise, the term “MYC,” as used herein, can refer to MYC from one or more species (e.g., humans, non-human primates, dogs, cats, guinea pigs, rabbits, rats, mice, horses, cattle, and bears).

[0356] In some aspects, an anti-MYC ASO of the present disclosure comprises the base sequence of SEQ ID NO: 1092. In some aspects, and anti-MYC ASO of the present disclosure comprises the MYC ASO sequence shown in FIG. 2.

### ASO Targeting CEBP/β

[0357] In some aspects, the biologically active molecule BAM is an anti-CEBP β ASO. Unless indicated otherwise, the term “CEBP/B,” as used herein, can refer to CEBP/β from one or more species (e.g., humans, non-human primates, dogs, cats, guinea pigs, rabbits, rats, mice, horses, cattle, and bears).

[0358] The sequence for the human CEBP β gene can be found under publicly available GenBank Accession Number NC_000020.11 (50190583 . . . 50192690). The human CEBP β gene is found at chromosome location 20q13.13 at 50190583-50192690.

[0359] The sequence for the human CEBP β pre-mRNA transcript (SEQ ID NO: 21) corresponds to the reverse complement of residues 50190583-50192690 of chromosome 20q13.13. The CEBP β mRNA sequence (GenBank Accession No. NM_001285878.1) is provided in SEQ ID NO: 23, except that the nucleotide “t” in SEQ ID NO: 23 is shown as “u” in the mRNA. The sequence for human CEBP/β protein can be found under publicly available Accession Numbers: P17676, (canonical sequence, SEQ ID NO: 22), P17676-2 (SEQ ID NO: 24), and P17676-3 (SEQ ID NO: 25), each of which is incorporated by reference herein in its entirety.

[0360] Natural variants of the human CEBP β gene product are known. For example, natural variants of human CEBP/β protein can contain one or more amino acid substitutions selected from: A241P, A253G, G195S, and any combination thereof. Additional variants of human CEBP/β protein resulting from alternative splicing are also known in the art. CEBP/β Isoform 2 (identifier: P17676-2 at UniProt) differs from the canonical sequence (SEQ ID NO: 23) as follows: deletion of residues 1-23 relative to SEQ ID NO: 23. The sequence of CEBP/β Isoform 3 (identifier: P17676-3) differs from the canonical sequence (SEQ ID NO: 23) as follows: deletion of residues 1-198 relative to SEQ ID NO: 23. Therefore, the anti-CEBPb ASOs of the present disclosure can be designed to reduce or inhibit expression of the natural variants of the protein.

[0361] An example of a target nucleic acid sequence of the anti-CEBPb ASOs is CEBP β pre-mRNA. SEQ ID NO: 21 represents a human CEBP β genomic sequence (i.e., reverse complement of nucleotides 50190583-50192690 of chromosome 20q13.13). SEQ ID NO: 21 is identical to a CEBP (pre-mRNA sequence except that nucleotide “t” in SEQ ID NO: 21 is shown as “u” in pre-mRNA. In certain aspects, the “target nucleic acid” comprises an intron of a CEBP/β protein-encoding nucleic acids or naturally occurring variants thereof, and RNA nucleic acids derived therefrom, e.g., pre-mRNA. In other aspects, the target nucleic acid comprises an exon region of a CEBP/β protein-encoding nucleic acids or naturally occurring variants thereof, and RNA nucleic acids derived therefrom, e.g., pre-mRNA. In yet other aspects, the target nucleic acid comprises an exon-intron junction of a CEBP/β protein-encoding nucleic acids or naturally occurring variants thereof, and RNA nucleic acids derived therefrom, e.g., pre-mRNA. The human CEBP/β protein sequence encoded by the CEBP β pre-mRNA is shown as SEQ ID NO: 23. In other aspects, the target nucleic acid comprises an untranslated region of a CEBP/β protein-encoding nucleic acids or naturally occurring variants thereof, e.g., 5′ UTR, 3′ UTR, or both.

[0362] In some aspects, an anti-CEBPb ASO of the disclosure hybridizes to a region within the introns of a CEBP β transcript, e.g., SEQ ID NO: 21. In certain aspects, an anti-CEBPb ASO of the disclosure hybridizes to a region within the exons of a CEBP β transcript, e.g., SEQ ID NO: 21. In other aspects, an anti-CEBPb ASO of the disclosure hybridizes to a region within the exon-intron junction of a CEBP β transcript, e.g., SEQ ID NO: 21. In some aspects, an anti-CEBPb ASO of the disclosure hybridizes to a region within a CEBP β transcript (e.g., an intron, exon, or exon-intron junction), e.g., SEQ ID NO: 21, wherein the anti-CEBPb ASO has a gapmer design.

[0363] In some aspects, the anti-CEBPb ASO targets an mRNA encoding a particular isoform of CEBP/β protein (e.g., Isoform 1). In some aspects, the anti-CEBPb ASO targets all isoforms of CEBP/β protein. In other aspects, the anti-CEBPb ASO targets two isoforms (e.g., Isoform 1 and Isoform 2, Isoform 1 and Isoform 3, or Isoform 2 and Isoform 3) of CEBP/β protein.

[0364] In some aspects, binding of an anti-CEBPb ASO targeting a CEBPb transcript disclosed herein to an mRNA transcript encoding (EBPb can reduce expression levels and/or activity levels of CEBPb.

[0365] In some aspects, any anti-(EBPb ASO described herein can be part of an EV (e.g., exosome) of the present disclosure, i.e., an EV (e.g., exosome) a comprising construct comprising a cleavable linker disclosed herein, e.g., a construct of Formula I or II in which the biologically active moiety BAM is an anti-CEBPb ASO described herein or a combination thereof.

### ASO Targeting STAT3

[0366] In some aspects, the biologically active molecule BAM is an anti-STAT3 ASO. Signal Transducer and Activator of Transcription 3 (STAT3) is a signal transducer and activator of transcription that transmits signals from cell surface receptors to the nucleus. STAT3 is frequently hyperactivated in many human cancers.

[0367] Signal transducer and activator of transcription 3 (STAT3) is known in the art by various names. Such names include: DNA-binding protein APRF, and acute-phase response factor. The mRNA encoding human STAT3 can be found at Genbank Accession Number NM_003150.3, and is represented by the sequence (SEQ ID NO: 43).

[0368] Natural variants of the human STAT3 gene product are known. Therefore, the ASOs of the present disclosure can be designed to reduce or inhibit expression of the natural variants of the STAT3 protein.

[0369] SEQ ID NO: 41 is identical to a STAT3 pre-mRNA sequence except that nucleotide “t” in SEQ ID NO: 41 is shown as “u” in pre-mRNA. In certain aspects, the “target nucleic acid” comprises an intron of a STAT3 protein-encoding nucleic acids or naturally occurring variants thereof, and RNA nucleic acids derived therefrom, e.g., pre-mRNA. In other aspects, the target nucleic acid comprises an exon region of a STAT3 protein-encoding nucleic acids or naturally occurring variants thereof, and RNA nucleic acids derived therefrom, e.g., pre-mRNA. In yet other aspects, the target nucleic acid comprises an exon-intron junction of a STAT3 protein-encoding nucleic acids or naturally occurring variants thereof, and RNA nucleic acids derived therefrom, e.g., pre-mRNA. The human STAT3 protein sequence encoded by the STAT3 pre-mRNA is shown as SEQ ID NO: 42. In other aspects, the target nucleic acid comprises an untranslated region of a STAT3 protein-encoding nucleic acids or naturally occurring variants thereof, e.g., 5′ UTR, 3′ UTR, or both.

[0370] In yet other aspects, the target nucleic acid comprises an exon-intron junction of a STAT3 protein-encoding nucleic acids or naturally occurring variants thereof, and RNA nucleic acids derived therefrom, e.g., pre-mRNA. The human STAT3 protein sequence encoded by the STAT3 pre-mRNA is shown as SEQ ID NO: 43. In other aspects, the target nucleic acid comprises an untranslated region of a STAT3 protein-encoding nucleic acids or naturally occurring variants thereof, e.g., 5′ UTR, 3′ UTR, or both.

[0371] In some aspects, an anti-STAT3 ASO of the disclosure hybridizes to a region within the introns of a STAT3 transcript, e.g., SEQ ID NO: 41 or SEQ ID NO: 43. In certain aspects, an anti-STAT3 ASO of the disclosure hybridizes to a region within the exons of a STAT3 transcript, e.g., SEQ ID NO: 41 or SEQ ID NO: 43. In other aspects, an anti-STAT3 ASO of the disclosure hybridizes to a region within the exon-intron junction of a STAT3 transcript, e.g., SEQ ID NO: 41 or SEQ ID NO: 43. In some aspects, an anti-STAT3 ASO of the disclosure hybridizes to a region within a STAT3 transcript (e.g., an intron, exon, or exon-intron junction), e.g., SEQ ID NO: 41 or SEQ ID NO: 43, wherein the anti-STAT3 ASO has a gapmer design.

[0372] In some aspects, the anti-STAT3 ASO targets an mRNA encoding a particular isoform of STAT3 protein (e.g., Isoform 1). In some aspects, the ASO targets all isoforms of STAT3 protein. In other aspects, the ASO targets two isoforms (e.g., Isoform 1 (UniProt ID: P40763-1) and Isoform 2 (UniProt ID: P40763-2), Isoform 2 and Isoform 3 (UniProt ID: P40763-3) of STAT3 protein.

[0373] In some aspects, an anti-STAT3 ASO of the disclosure hybridizes to a region within the introns of a STAT3 transcript, e.g., SEQ ID NO: 41 or SEQ ID NO: 43. In certain aspects, an anti-STAT3 ASO of the disclosure hybridizes to a region within the exons of a STAT3 transcript, e.g., SEQ ID NO: 41 or SEQ ID NO: 43. In other aspects, an anti-STAT3 ASO of the disclosure hybridizes to a region within the exon-intron junction of a STAT3 transcript, e.g., SEQ ID NO: 41 or SEQ ID NO: 43. In some aspects, an anti-STAT3 ASO of the disclosure hybridizes to a region within a STAT3 transcript (e.g., an intron, exon, or exon-intron junction), e.g., SEQ ID NO: 41 or SEQ ID NO: 43, wherein the ASO has a gapmer design.

[0374] In some aspects, the anti-STAT3 ASO of the present disclosure hybridizes to multiple target regions within the STAT3 transcript (e.g., genomic sequence, SEQ ID NO: 41). In some aspects, the ASO hybridizes to two different target regions within the STAT3 transcript. In some aspects, the anti-STAT3 ASO hybridizes to three different target regions within the STAT3 transcript. In some aspects, the anti-STAT3 ASOs that hybridizes to multiple regions within the STAT3 transcript (e.g., genomic sequence, SEQ ID NO: 41) are more potent (e.g., having lower EC50) at reducing STAT3 expression compared to anti-STAT3 ASOs that hybridizes to a single region within the STAT3 transcript (e.g., genomic sequence, SEQ ID NO: 41).

[0375] The anti-STAT3 ASOs of the disclosure comprise a contiguous nucleotide sequence which corresponds to the complement of a region of STAT3 transcript, e.g., a nucleotide sequence corresponding to SEQ ID NO: 41.

[0376] In some aspects, binding of an anti-STAT3 ASO targeting a STAT3 transcript disclosed herein to an mRNA transcript encoding STAT3 can reduce expression levels and/or activity levels of STAT3.

[0377] In some aspects, any anti-STAT3 ASO described herein can be part of an EV (e.g., exosome) of the present disclosure, i.e., an EV (e.g., exosome) a comprising construct comprising a cleavable linker disclosed herein, e.g., a construct of Formula I or II in which the biologically active moiety BAM is an anti-STAT3 ASO described herein or a combination thereof.

### ASO Targeting NRAS

[0378] In some aspects, the biologically active molecule BAM is an anti-NRas ASO. NRas is an oncogene encoding a membrane protein that shuttles between the Golgi apparatus and the plasma membrane. NRas-encoding genomic DNA can be found at Chromosomal position 1p13.2 (i.e., nucleotides 5001 to 17438 of GenBank Accession No. NG_007572). Specifically, a combination of time-lapse microscopy and photobleaching techniques have revealed that in the absence of palmitoylation, GFP-tagged N-Ras undergoes rapid exchange between the cytosol and ER/Golgi membranes, and that wild-type GFP—N-Ras is recycled to the Golgi complex by a nonvesicular mechanism. N-ras mutations have been described in melanoma, thyroid carcinoma, teratocarcinoma, fibrosarcoma, neuroblastoma, rhabdomyosarcoma, Burkitt lymphoma, acute promyelocytic leukemia, T cell leukemia, and chronic myelogenous leukemia. Oncogenic N-Ras can induce acute myeloid leukemia (AML) or chronic myelomonocytic leukemia (CMML)-like disease in mice.

[0379] Neuroblastoma RAS viral oncogene (NRas) is known in the art by various names. Such names include: GTPase NRas, N-ras protein part 4, neuroblastoma RAS viral (v-ras) oncogene homolog neuroblastoma RAS viral oncogene homolog, transforming protein N-Ras, and v-ras neuroblastoma RAS viral oncogene homolog.

[0380] The NRAS gene provides instructions for making a protein called N-Ras that is involved primarily in regulating cell division. The mRNA sequence encoding human NRAS can be found at NCBI Reference sequence NM_002524.5 and is represented by the coding sequence (SEQ ID NO: 53).

[0381] Natural variants of the human NRas gene product are known. For example, natural variants of human NRas protein can contain one or more amino acid substitutions selected from: G12D, G13D, T50I, G60E, and any combinations thereof. Additional variants of human NRas protein resulting from alternative splicing are also known in the art, such as: G13R, Q61K, Q61R, and P34L. Therefore, the anti-NRas ASOs of the present disclosure can be designed to reduce or inhibit expression of the natural variants of the STAT3 protein.

[0382] SEQ ID NO: 51 is identical to a NRas pre-mRNA sequence except that nucleotide “t” in SEQ ID NO: 51 is shown as “u” in pre-mRNA. In certain aspects, the “target nucleic acid” comprises an intron of a NRas protein-encoding nucleic acids or naturally occurring variants thereof, and RNA nucleic acids derived therefrom, e.g., pre-mRNA. In other aspects, the target nucleic acid comprises an exon region of a NRas protein-encoding nucleic acids or naturally occurring variants thereof, and RNA nucleic acids derived therefrom, e.g., pre-mRNA. In yet other aspects, the target nucleic acid comprises an exon-intron junction of a NRas protein-encoding nucleic acids or naturally occurring variants thereof, and RNA nucleic acids derived therefrom, e.g., pre-mRNA. The human NRas protein sequence encoded by the NRas pre-mRNA is shown as SEQ ID NO: 52. In other aspects, the target nucleic acid comprises an untranslated region of a NRas protein-encoding nucleic acids or naturally occurring variants thereof, e.g., 5′ UTR, 3′ UTR, or both.

[0383] In certain aspects, the anti-NRas ASOs of the disclosure also are capable of down-regulating (e.g., reducing or removing) expression of the NRas mRNA or protein. In this regard, the anti-NRas ASO of the disclosure can affect indirect inhibition of NRas protein through the reduction in NRas mRNA levels, typically in a mammalian cell, such as a human cell, such as a tumor cell. In particular, the present disclosure is directed to anti-NRas ASOs that target one or more regions of the NRas pre-mRNA (e.g., intron regions, exon regions, and/or exon-intron junction regions). Unless indicated otherwise, the term “NRas,” as used herein, can refer to NRas from one or more species (e.g., humans, non-human primates, dogs, cats, guinea pigs, rabbits, rats, mice, horses, cattle, and bears).

[0384] In some aspects, an anti-NRas ASO of the disclosure hybridizes to a region within the introns of a NRAS transcript, e.g., SEQ ID NO: 51 or SEQ ID NO: 53. In certain aspects, an ASO of the disclosure hybridizes to a region within the exons of a NRAS transcript, e.g., SEQ ID NO: 51 or SEQ ID NO: 53. In other aspects, an ASO of the disclosure hybridizes to a region within the exon-intron junction of a NRAS transcript, e.g., SEQ ID NO: 51 or SEQ ID NO: 53. In some aspects, an anti-NRas ASO of the disclosure hybridizes to a region within a NRAS transcript (e.g., an intron, exon, or exon-intron junction), e.g., SEQ ID NO: 51 or SEQ ID NO: 53, wherein the ASO has a gapmer design.

[0385] In some aspects, the anti-NRas ASO of the present disclosure hybridizes to multiple target regions within the NRas transcript (e.g., genomic sequence, SEQ ID NO: 51). In some aspects, the anti-NRas ASO hybridizes to two different target regions within the NRas transcript. In some aspects, the anti-NRas ASO hybridizes to three different target regions within the NRas transcript. In some aspects, the anti-NRas ASOs that hybridizes to multiple regions within the NRas transcript (e.g., genomic sequence, SEQ ID NO: 51) are more potent (e.g., having lower EC50) at reducing NRas expression compared to anti-NRas ASOs that hybridizes to a single region within the NRas transcript (e.g., genomic sequence, SEQ ID NO: 51).

[0386] In some aspects, the ASO targets an mRNA encoding a particular isoform of NRAS protein (e.g., Isoform 1, NCBI ID: NP_001229821.1). In some aspects, the ASO targets all isoforms of NRas protein. In other aspects, the ASO targets two isoforms (e.g., Isoform 1 and Isoform 2 (NCBI ID: NP_009089.4), Isoform 2 and Isoform 3 (NCBI ID: NP_001123995), and Isoform 3 and Isoform 4 (NCBI ID: NP_001229820.1)) of NRas protein.

[0387] The anti-NRas ASOs of the disclosure comprise a contiguous nucleotide sequence which corresponds to the complement of a region of NRas transcript, e.g., a nucleotide sequence corresponding to SEQ ID NO: 51.

[0388] In some aspects, binding of an anti-NRas ASO targeting a NRas transcript disclosed herein to an mRNA transcript encoding NRas can reduce expression levels and/or activity levels of NRas.

[0389] In some aspects, any anti-NRas ASO described herein can be part of an EV (e.g., exosome) of the present disclosure, i.e., an EV (e.g., exosome) a comprising construct comprising a cleavable linker disclosed herein, e.g., a construct of Formula I or II in which the biologically active moiety BAM is an anti-NRas ASO described herein or a combination thereof.

### ASO Targeting KRAS

[0390] In some aspects, the biologically active molecule BAM is an anti-KRAS ASO. The sequence for the human KRAS gene can be found at chromosomal location 12p12.1 and under publicly available GenBank Accession Number NC_000012 (25,204,789-25,250,936). The genomic sequence for human wild-type KRAS transcript corresponds to the reverse complement of residues 25,204,789-25,250,936 of NC_000012 (SEQ ID NO: 35). The KRAS G12D) genomic sequence provided in SEQ ID NO: 31 differs from SEQ ID NO: 35 in that it has a guanine to adenine substitution at nucleotide position 5,587. An exemplary KRAS G12D) mRNA sequence is provided in SEQ ID NO: 33, except that the nucleotide “t” in SEQ ID NO: 33 is shown as “u” in the mRNA. The KRAS G12D) mRNA provided in SEQ ID NO: 33 differs from the wild-type mRNA sequence (e.g., GenBank Accession No. NM_004985.5; SEQ ID NO: 37) in that it has a guanine to adenine substitution at nucleotide position 225. The sequence for human KRAS protein can be found under publicly available Accession Numbers: P01116 (canonical sequence), A8K8Z5, BOLPF9, P01118, and Q96D10, each of which is incorporated by reference herein in its entirety.

[0391] There are two isoforms of the human KRAS protein (P01116), resulting from alternative splicing. Isoform 2A (Accession Number: P01116-1; SEQ ID NO: 38) is the canonical sequence. It is also known as K-Ras4A. Isoform 2B (Accession Number: P01116-2; also known as K-Ras4B; SEQ ID NO: 36) differs from the canonical sequence as follows: (i) 151-153: RVE->GVD; and (ii) 165-189: QYRLKKISKEEKTPGCVKIKKCIIM (SEQ ID NO:599)->KHKEKMSKDGKKKKKKSKTKCVIM (SEQ ID NO:600). In some aspects, anti-KRAS ASOs disclosed herein can reduce or inhibit expression of KRAS protein Isoform 2A, Isoform 2B, or both.

[0392] Natural variants of the human KRAS gene product are known. For example, natural variants of human KRAS protein can contain one or more amino acid substitutions selected from: K5E, K5N, G10GG, G10V, G12A, G12C, G12F, G12I, G12L, G12R, G12S, G12V, G13C, G13D, G13E, G13R, G13V, V14I, L19F, T20M, Q22E, Q22H, Q22K, Q22R, Q25H, N26Y, F28L, E31K, D33E, P34L, P34Q, P34R, 136M, R41K, D57N, T58I, A59T, G60D, G60R, G60S, G60V, Q61A, Q61H, Q61K, Q61L, Q61P, Q61R, E63K, S65N, R68S, Y71H, T74A, L79I, R97I, Q99E, M11IL, K117N, K117R, D119G, S122F, T144P, A146P, A146T, A146V, K147E, K147T, R¹⁴⁹K, L₁₅₉S, I163S, R¹⁶⁴Q, 1183N, 184M, or combinations thereof. Natural variants that are specific to KRAS protein Isoform 2B contain one or more amino acid substitutions selected from: V152G, D₁₅₃V, F156I, F156L, or combinations thereof. The anti-KRAS ASOs of the present disclosure can be designed to reduce or inhibit expression of one or more of the variants of the KRAS protein (e.g., any variants known in the art). In some aspects, a KRAS mutant has an amino acid substitution of G12D. In some aspects, the anti-KRAS ASOs of the present disclosure target one or more KRAS mutants. In other aspects, a KRAS mutant that the anti-KRAS ASOs target is KRAS G12D (SEQ ID NO: 32). Exemplary sequences for KRAS G12D) mRNA and KRAS G12D protein are provided in SEQ ID NO: 33 and SEQ ID NO: 32.

[0393] In some aspects, a target nucleic acid sequence of an anti-KRAS ASO disclosed herein comprises one or more regions of a KRAS pre-mRNA. For example, SEQ ID NO: 31 (described above) is identical to a KRAS pre-mRNA sequence except that nucleotide “t” in SEQ ID NO: 31 is shown as “u” in the pre-mRNA. As used herein, the term “target nucleic acid sequence” refers to a nucleic acid sequence that is complementary to an anti-KRAS ASO disclosed herein. In certain aspects, the target nucleic acid sequence comprises an exon region of a KRAS protein-encoding nucleic acids or naturally occurring variants thereof, and RNA nucleic acids derived therefrom, e.g., pre-mRNA. In some aspects, the target nucleic acid sequence comprises an intron of a KRAS protein-encoding nucleic acids or naturally occurring variants thereof, and RNA nucleic acids derived therefrom, e.g., pre-mRNA. In further aspects, the target nucleic acid sequence comprises an exon-intron junction of a KRAS protein-encoding nucleic acids or naturally occurring variants thereof, and RNA nucleic acids derived therefrom, e.g., pre-mRNA. In some aspects, for example, when used in research or diagnostics, the target nucleic acid can be a cDNA or a synthetic oligonucleotide derived from DNA or RNA nucleic acid targets described herein. In some aspects, the target nucleic acid comprises an untranslated region of a KRAS protein-encoding nucleic acids or naturally occurring variants thereof, e.g., 5′ UTR, 3′ UTR, or both.

[0394] Accordingly, in some aspects, an anti-KRAS ASO disclosed herein hybridizes to an exon region of a KRAS transcript, e.g., SEQ ID NO: 31 or SEQ ID NO: 33. In some aspects, an anti-KRAS ASO of the present disclosure hybridizes to an intron region of a KRAS transcript, e.g., SEQ ID NO: 31. In some aspects, an anti-KRAS ASO hybridizes to an exon-intron junction of a KRAS transcript, e.g., SEQ ID NO: 31. In some aspects, an anti-KRAS ASO of the present disclosure hybridizes to a region within a KRAS transcript (e.g., an intron, exon, or exon-intron junction), e.g., SEQ ID NO: 31.

[0395] In some aspects, a target nucleic sequence of the ASOs disclosed herein is a KRAS mRNA, e.g., SEQ ID NO: 33. Accordingly, in certain aspects, an anti-KRAS ASO disclosed herein can hybridize to one or more regions of a KRAS mRNA. In some aspects, anti-KRAS ASOs of the present disclosure target mRNA encoding a particular isoform of KRAS protein. In certain aspects, anti-KRAS ASOs disclosed herein can target all isoforms of KRAS protein, including any variants thereof (e.g., those described herein). In some aspects, a KRAS protein that can be targeted by anti-KRAS ASOs of the present disclosure comprises a G12D amino acid substitution.

[0396] In some aspects, binding of an anti-KRAS ASO targeting a KRAS transcript disclosed herein to an mRNA transcript encoding KRAS can reduce expression levels and/or activity levels of KRAS.

[0397] In some aspects, any anti-KRAS ASO described herein can be part of an EV (e.g., exosome) of the present disclosure, i.e., an EV (e.g., exosome) a comprising construct comprising a cleavable linker disclosed herein, e.g., a construct of Formula I or II in which the biologically active moiety BAM is an anti-KRAS ASO described herein or a combination thereof.

### ASO Targeting Pmp22

[0398] In some aspects, the biologically active molecule BAM is an anti-Pmp22 ASO. Peripheral myelin protein 22 (PMP22) is also known as growth arrest-specific protein 3 (GAS-3), is encoded by the PMP22 gene. PMP22 is a 22 kDa transmembrane glycoprotein made up of 160 amino acids, and is mainly expressed in the Schwann cells of the peripheral nervous system. Schwann cells show high expression of PMP22, where it can constitute 2-5% of total protein content in compact myelin. Compact myelin is the bulk of the peripheral neuron's myelin sheath, a protective fatty layer that provides electrical insulation for the neuronal axon. The level of PMP22 expression is relatively low in the central nervous system of adults. PMP22 plays an essential role in the formation and maintenance of compact myelin. When Schwann cells come into contact with a neuronal axon, expression of PMP22 is significantly up-regulated, whereas PMP22 is down-regulated during axonal degeneration or transection. PMP22 has shown association with zonula-occludens 1 and occludin, proteins that are involved in adhesion with other cells and the extracellular matrix, and also support functioning of myelin. Along with cell adhesion function, PMP22 is also up-regulated during Schwann cell proliferation, suggesting a role in cell-cycle regulation. PMP22 is detectable in non-neural tissues, where its expression has been shown to serve as growth-arrest-specific (gas-3) function.

[0399] Improper gene dosage of the PMP22 gene can cause aberrant protein synthesis and function of myelin sheath. Since the components of myelin are stoichiometrically set, any irregular expression of a component can cause destabilization of myelin and neuropathic disorders. Alterations of PMP22 gene expression are associated with a variety of neuropathies, such as Charcot-Marie-Tooth type 1A (CMTIA), Dejerine-Sottas disease, and Hereditary Neuropathy with Liability to Pressure Palsy (HNPP). Too much PMP22 (e.g., caused by gene duplication) results in CMTIA. Gene duplication of PMP22 is the most common genetic cause of CMT where the overproduction of PMP22 results in defects in multiple signaling pathways and dysfunction of transcriptional factors like KNOX20, SOX10 and EGR2.

[0400] The sequence for the human PMP22 gene can be found under publicly available as NCBI RefSeq Acc. No. NM_000304. Alternative RefSeq mRNA transcripts have accession numbers NM_001281455, NM-001281456, NM-153321, and NM_153322, respectively. The human PMP22 gene is found at chromosome location 17p12 at 15,229,777-15,265,326.

[0401] The sequence for the human PMP22 pre-mRNA transcript (SEQ ID NO: 264) corresponds to the reverse complement of residues 15,229,777-15,265,326, of chromosome location 17p12. The PMP22 mRNA sequence (GenBank Accession No. NM_000304.4) is provided in SEQ ID NO: 58. The sequence for human PMP22 protein can be found under publicly available Uniprot Accession Number Q01453 (canonical sequence, SEQ ID NO: 60). Potential PMP22 isoforms have Uniprot Accession Numbers A8MU75, J3KQWO, A0A2R⁸Y5L5, J3KT36, and J3QS08, respectively. The publicly available contents of the database entries corresponding to accession numbers disclosed herein are incorporated by reference in their entireties.

[0402] The anti-PMP22 ASOs of the present disclosure can be designed to reduce or inhibit expression of the natural variants of the PMP22 protein.

[0403] An example of a target nucleic acid sequence of the anti-PMP22 ASOs is PMP22 pre-mRNA. SEQ ID NO: 58 represents a human PMP22 genomic sequence (i.e., reverse complement of nucleotides 15,229,777-15,265,326, complement, of chromosome 17p12). SEQ ID NO: 58 is identical to a PMP22 pre-mRNA sequence except that nucleotide “t” in SEQ ID NO: 58 is shown as “u” in pre-mRNA.

[0404] In some aspects, the anti-PMP22 ASO comprises a contiguous nucleotide sequence of 10 to 30 nucleotides in length that is complementary to a nucleic acid sequence within nucleotides 1 to 1828 of a PMP22 transcript corresponding to a nucleotide sequence as set forth in SEQ ID NO: 264 (PMP22 full mRNA transcript) or nucleotides 208 to 690 of a PMP22 transcript corresponding to a nucleotide sequence as set forth in SEQ ID NO: 59 (PMP22 coding sequence).

[0405] In some aspects, the contiguous nucleotide sequence is at least 80%, at least 85%, at least 90%, at least 95%, or about 100% complementary to the nucleic acid sequence within the PMP22 transcript. In some aspects, the anti-PMP22 ASO is capable of reducing PMP22 protein expression in a human cell (e.g., a Schwan cell), wherein the human cell expresses the PMP22 protein.

[0406] In some aspects, the PMP22 protein expression is reduced by at least 30%, at least 35%, at least 40%, at least 45%, at least 50%, at least 55%, at least 60%, at least 65%, at least 70%, at least 75%, at least 80%, at least 85%, at least 90%, at least 95%, or about 100% compared to PMP22 protein expression in a human cell that is not exposed to the anti-PMP22 ASO.

[0407] In some aspects, the anti-PMP22 ASO is capable of reducing a level of PMP22 mRNA in a human cell (e.g., an immune cell), wherein the human cell expresses the PMP22 mRNA. In some aspects, the level of PMP22 mRNA is reduced by at least 30%, at least 35%, at least 40%, at least 45%, at least 50%, at least 55%, at least 60%, at least 65%, at least 70%, at least 75%, at least 80%, at least 85%, at least 90%, at least 95%, or about 100% compared to the level of the PMP22 mRNA in a human cell that is not exposed to the anti-PMP22 ASO.

[0408] In certain aspects, the target nucleic acid comprises an intron of a PMP22 protein-encoding nucleic acids or naturally occurring variants thereof, and RNA nucleic acids derived therefrom, e.g., pre-mRNA. In other aspects, the target nucleic acid comprises an exon region of a PMP22 protein-encoding nucleic acids or naturally occurring variants thereof, and RNA nucleic acids derived therefrom, e.g., pre-mRNA. In yet other aspects, the target nucleic acid comprises an exon-intron junction of a PMP22 protein-encoding nucleic acids or naturally occurring variants thereof, and RNA nucleic acids derived therefrom, e.g., pre-mRNA. In some aspects, for example when used in research or diagnostics the target nucleic acid can be a cDNA or a synthetic oligonucleotide derived from the above DNA or RNA nucleic acid targets. The human PMP22 coding sequence (CDS) is shows as SEQ ID NO: 59, and protein sequence encoded by the coding sequence in the PMP22 pre-mRNA is shown as SEQ ID NO: 60. In other aspects, the target nucleic acid comprises an untranslated region of a PMP22 protein-encoding nucleic acids or naturally occurring variants thereof, e.g., 5′ UTR, 3′ UTR, or both.

[0409] In some aspects, an anti-PMP22 ASO of the disclosure hybridizes to a region within the introns of a PMP 22 transcript, e.g., SEQ ID NO: 58. In certain aspects, an ASO of the disclosure hybridizes to a region within the exons of a PMP22 transcript, e.g., SEQ ID NO: 58. In other aspects, an anti-PMP22 ASO of the disclosure hybridizes to a region within the exon-intron junction of a PMP22 transcript, e.g., SEQ ID NO: 58.

[0410] In some aspects, any anti-PMP22 ASO described herein can be part of an EV (e.g., exosome) of the present disclosure, i.e., an EV (e.g., exosome) a comprising construct comprising a cleavable linker disclosed herein, e.g., a construct of Formula I or II in which the biologically active moiety BAM is an anti-PMP22 ASO described herein or a combination thereof.

[0411] In some aspects, the construct of Formula I or II comprises ASO targeting STAT6 as the BAM conjugated at either the 5′ or 3′ end and L₁, L₂, and/or L₃ comprises a phosphodiester bond, a disulfido bond, and a cell penetrating peptide. In some aspects, the construct of Formula I or II comprises ASO as the BAM conjugated at either the 5′ or 3′ end and two of L₁, L₂, and L₃ comprise a disulfido bond and the third cleavable linker comprises a cell penetrating peptide. In some aspects, the construct of Formula I or II comprises ASO as the BAM conjugated at either the 5′ or 3′ end and L₁, L₂, and/or L₃ comprises a disulfido bond, a peptidyl, such as Val-Cit peptidyl, and a cell penetrating peptide. In any of the foregoing examples, the anchoring moiety AM is formed from a sterol, such as cholesterol, including cholesterol-TEG or thiocholesterol. In any of the foregoing examples, the AM is formed from dipalmitoylphosphatidic acid. In any of the foregoing examples, at leas tone of SP₁, SP₂, SP₃, and SP₄ comprises C₁₋₆ alkylenyl (e.g., C₂ alkylenyl, C₆ alkylenyl, or C₅ alkylenyl), polyoxyalkenyl (e.g., a polyoxyalkylenyl that comprises 2 to 15 —OCH₂CH₂-repeat units), a carbamoyl, an amino, an amido, a thiosuccinimido, a 1,2,3-triazolydibenzoylcyclooctenyl, a 1,2,3-triazolylbicyclononenyl, or a combination thereof, wherein the 1,2,3-triazolydibenzoylcyclooctenyl has the structure

[chemical structure]

and
the 1,2,3-triazolylbicyclononenyl the structure:

[chemical structure]

wherein denotes connectivity to AM, BAM, L₁, L₂, L₃, or the remainder of the spacer.

[0412] In some aspects, Formula I or II is a construct selected from

[chemical structure]

[chemical structure]

[chemical structure]

[chemical structure]

wherein the cell-penetrating peptide (CPP) is Antp (a peptidyl of the sequence RQIKIWFQNRRMKWKK (SEQ ID NO: 62)), R6 (a peptidyl of the sequence RRRRRR (SEQ ID NO: 87)), or cTAT (a peptide of sequence KRRRGRKKRRE (wherein K and E are connected to form a cyclic peptide)(SEQ ID NO: 88)), and

[chemical structure]

[0413] In some aspects, the EV is an exosome, e.g., a native exosome or a recombinant exosome. In some aspects wherein the exosome is a native exosome, the load density of ASO attached to the exosome is increased by at least 1.5-fold with respect to a control (see above). In some aspects wherein the exosome is an exosome overexpressing PTGFRN, the load density of ASO attached to the exosome is increased by at least 2-fold with respect to a control, e.g., a construct without a cleavable linker such as AM-BAM or AM-SP₁-BAM.

[0414] In some aspects wherein the exosome is a native exosome and the anchoring moiety AM (e.g., cholesterol, tocopherol, or palmitate), the average number of ASO molecules per native exosome is between about 500 and about 10,000. In some aspects, the average number of ASO molecules per native exosome is between about 1,000 and about 7,000. In some aspects, the average number of ASO molecules per native exosome is between about 700 and about 9,500, between about 800 and about 9,000, between about 850 and about 8,500, between about 900 and about 8,000, between about 950 and about 7,500, or between about 1,000 and about 7,000. In some aspects, the average number of ASO molecules per native exosome is at least 500, at least 600, at least 700, at least 800, at least 850, at least 900, at least 950, at least 1000, at least 1050, at least 1100, at least 1150, at least 1200, at least 1250, or at least 1300 and/or 10,000 or fewer, 9,000 or fewer, 8,000 or fewer, 7,500 or fewer, 7,000 or fewer, 6,500 or fewer, 6,000 or fewer, 5,500 or fewer, 5,000 or fewer, 4,500 or fewer, 4,000 or fewer, 3,500 or fewer, 3,000 or fewer, 2,500 or fewer, 2,000 or fewer, 1,500 or fewer, or 1,000 or fewer. In some aspects, the loading efficiency of the native exosome is between about 70% and about 95%. In some aspects, the loading efficiency of the native exosome is between about 70% and about 75%, between about 75% and about 80%, between about 80% and about 85%, between about 85% and about 90%, or between about 90% and about 95%. In some aspects, the loading efficiency of the native exosome is at least 70%, at least 75%, at least 80%, at least 85%, at least 90%, or at least 95%.

[0415] In some aspects wherein the exosome is a Scaffold-X exosome and the anchoring moiety AM is cholesterol, the average number of ASO molecules per exosome is 2442+/−339. In some aspects, the average number of ASO molecules per Scaffold-X exosome is between about 2000 and about 3000. In some aspects, the average number of ASO molecules per Scaffold-X exosome is between about 2000 and about 2100, between about 2100 and about 2200, between about 2200 and about 2300, between about 2300 and about 2400, between about 2400 and about 2500, between about 2500 and about 2600, between about 2600 and about 2700, between about 2700 and about 2800, between about 2800 and about 2900, or between about 2900 and about 3000. In some aspects, the average number of ASO molecules per Scaffold-X exosome is at least 2000, at least 2100, at least 2200, at least 2300, at least 2400, at least 2500, at least 2600, at least 2700, at least 2800, at least 2900, or at least 3000. In some aspects, the loading efficiency of the Scaffold-X exosome is 27% to 46%. In some aspects, the loading efficiency of the Scaffold-X exosome is between about 25% and about 50%. In some aspects, the loading efficiency of the Scaffold-X exosome is between about 25% and about 30%, between about 30% and about 35%, between about 35% and about 40%, between about 40% and about 45%, or between about 45% and about 50%. In some aspects, the loading efficiency of the Scaffold-X exosome is at least 25%, at least 30%, at least 35%, at least 40%, at least 45%, or at least 50%.

[0416] In some aspects, the average number of ASO molecules per Scaffold-X exosome is more than 5000, more than 6000, more than 7000, more than 8000, more than 9000, more than 10,000, more than 11,000, more than 12,000, more than 13,000, more than 14,000, more than 15,000, more than 16,000, more than 17,000, more than 18,000, more than 19,000, or more than 20,000. In some aspects, the average number of ASO molecules per Scaffold-X exosome is between about 5000 and about 6,000, about 6,000 and about 7,000, about 7,000 and about 8,000, about 8,000 and about 9,000, about 9,000 and about 10,000, about 10,000 and about 11,000, about 11,000 and about 12,000 about 12,000 and about 13,000, about 13,000 and about 14,000, about 14,000 and about 15,000, about 15,000 and about 16,000, about 16,000 and about 17,000, about 17,000 and about 18,000, about 18,000 and about 19,000, or about 19,0000 and about 20,000.

### Methods of Making

[0417] The present disclosure provides a method of attaching a biologically active molecule BAM to an EV (e.g., an exosome) comprising linking an anchoring moiety AM to the EV, wherein the anchoring moiety AM is attached to the biologically active moiety BAM according to Formula I or II:

[chemical structure]

wherein L₁, L₂, and L₃ are the same or different and each is an optional cleavable linkage; and SP₁, SP₂, SP₃, and SP₄ are optional first, second, third, and fourth spacers, respectively, and wherein at least one of L₁, L₂, and L₃ is present and comprises a cell penetrating peptide. In some aspects, BAM is an antisense oligonucleotide (ASO), e.g., a gapmer.

[0418] The present disclosure also provides a method of increasing the load density of a biologically active molecule BAM attached to an EV, comprising screening a library of anchoring moieties AM attached to the biologically active moiety BAM according to Formula I or II:

[chemical structure]

wherein L₁, L₂, and L₃ are the same or different and each is an optional cleavable linkage; and SP₁, SP₂, SP₃, and SP₄ are optional first, second, third, and fourth spacers, respectively, and wherein at least one of L₁, L₂, and L₃ is present and comprises a cell penetrating peptide. In some aspects, BAM is an antisense oligonucleotide (ASO), e.g., a gapmer. In some aspects, the load density of a biologically active molecule BAM attached to an EV, e.g., an exosome, is increased at least 1-fold, at least 1.5-fold, at least 2-fold, at least 2.5-fold, at least 3-fold, at least 3.5-fold, at last about 4-fold, at least 4.5-fold, at least 5-fold, at least 5.5-fold, at least 6-fold, at least 6.5-fold, at least 7-fold, at least 7.5-fold, at least 8-fold, at least 8.5-fold, at least 9-fold, at least 9.5-fold, or at least 10-fold with respect to a control. In some aspects, the control is a corresponding construct lacking the cleavable linker (e.g., L₁, L₂, and/or L₃). For example, in some aspects, the control for a construct of Formula I or II, is a control construct with the structure AM-BAM or AM-SP₁-BAM.

[0419] EVs (e.g., exosomes) of the present disclosure can be produced by chemical synthesis, recombinant DNA technology, biochemical or enzymatic fragmentation of larger molecules, combinations of the foregoing or by any other method. In one aspect, the present disclosure provides a method of attaching a biologically active molecule to an EV (e.g., exosome) via a cleavable linker disclosed herein, e.g., via solid phase synthesis or conjugation.

[0420] Exosome production: In some aspects, EVs disclosed herein (e.g., exosomes) can be produced from a cell grown in vitro or a body fluid of a subject. When exosomes are produced from in vitro cell culture, various producer cells, e.g., HEK293 cells, CHO cells, and MSCs, can be used. In some aspects, a producer cell is not a dendritic cell, macrophage, B cell, mast cell, neutrophil, Kupffer-Browicz cell, cell derived from any of these cells, or any combination thereof.

[0421] In certain aspects, the producer cell is HEK293 cells. Human embryonic kidney 293 cells, also often referred to as HEK 293, HEK-293, 293 cells, or less precisely as HEK cells, are a specific cell line originally derived from human embryonic kidney cells grown in tissue culture.

[0422] A comprehensive study of the genomes and transcriptomes of HEK 293 and five derivative cell lines compared the HEK 293 transcriptome with that of human kidney, adrenal, pituitary and central nervous tissue. The HEK 293 pattern most closely resembled that of adrenal cells, which have many neuronal properties. HEK 293 cells have a complex karyotype, exhibiting two or more copies of each chromosome and with a modal chromosome number of 64. They are described as hypotriploid, containing less than three times the number of chromosomes of a haploid human gamete. Chromosomal abnormalities include a total of three copies of the X chromosome and four copies of chromosome 17 and chromosome 22. Variants of HEK293 cells useful to produce EVs include, but are not limited to, HEK 293F, HEK 293 FT, and HEK 293T.

[0423] Solid-phase synthesis: Solid phase synthesis known in the art can additionally or alternatively be employed to generate the constructs disclosed in the present application. In some aspects, two or more components of a cleavable linker disclosed herein can be attached to each other (e.g., concatenated) using solid phase synthesis. For example, an ASO can be synthesized, and different spacers or combinations thereof can be added to the ASO via conventional synthetic steps. A spacer, such as C₃-phosphoramidite, TEG-phosphoramidite, or HEG-phosphoramidite cam be used. In some aspects, the spacer or combination of spacers can be further extended via synthesis to incorporate the membrane anchor moiety. In an example, phosphoramidites can be used to generate the optimized linkers of the present disclosure via solid phase synthesis such as octyl-tocopherol phosphoramidite, tocopherol phosphoramidite, palmitate-C₆ phosphoramidite, cholesterol-TEG phosphoramidite or or cholesterol-C₆ phosphoramidite. Suitable solid phase techniques, including automated synthesis techniques, are described, e.g., in F. Eckstein (ed.), Oligonucleotides and Analogues, a Practical Approach, Oxford University Press, New York (1991) and Toy, P.H.; Lam, Y (ed.), Solid-Phase Organic synthesis, concepts, Strategies, and Applications, John Wiley & Sons, Inc. New Jersey (2012).

[0424] Conjugation: In some aspects, two or more components of a linker disclosed herein can be attached to each other (e.g., concatenated) using conjugation. Besides amine-reactive compounds, those having chemical groups that form bonds with sulfhydryls (—SH) can be used as crosslinkers and modification reagents for protein and other bioconjugate techniques. Sulfhydryls, also called thiols, exist in proteins in the side-chain of cysteine (Cys, C) amino acids.

[0425] Sulfhydryl groups are useful targets for protein conjugation and labeling. First, sulfhydryls are present in most proteins but are not as numerous as primary amines; thus, crosslinking via sulfhydryl groups is more selective and precise. Second, sulfhydryl groups in proteins are often involved in disulfide bonds, so crosslinking at these sites typically does not significantly modify the underlying protein structure or block binding sites. Third, the number of available (i.e., free) sulfhydryl groups can be easily controlled or modified; they can be generated by reduction of native disulfide bonds, or they can be introduced into molecules through reaction with primary amines using sulfhydryl-addition reagents, such as 2-iminothiolane (Traut's Reagent), N-succinimidyl S-acetylthioacetate (SATA), N-succinimidyl S-acetylthiopropionate (SATP), or N-Succinimidyl S-acetyl (thiotetraethylene glycol)(SAT (PEG)). Finally, combining sulfhydryl-reactive groups with amine-reactive groups to make heterobifunctional crosslinkers provides greater flexibility and control over crosslinking procedures. For example, using 3-maleimido-propionic N-hydroxysuccinimide (NHS) ester, which contains a maleimide group and an NHS ester, the NHS ester can be used to label the primary amines (-NH₂) of proteins, amine-modified oligonucleotides, and other amine-containing molecules. The maleimide group will react with a thiol group to form a covalent bond, enabling the connection of biomolecule with a thiol.

[0426] The maleimide group reacts specifically with sulfhydryl groups when the pH of the reaction mixture is between 6.5 and 7.5; the result is formation of a stable thioether linkage that is not reversible (i.e., the bond cannot be cleaved with reducing agents). In more alkaline conditions (pH>8.5), the reaction favors primary amines and also increases the rate of hydrolysis of the maleimide group to a non-reactive maleamic acid. Maleimides do not react with tyrosines, histidines or methionines.

[0427] Thiol-containing compounds, such as dithiothreitol (DTT) and beta-mercaptoethanol (BME), must be excluded from reaction buffers used with maleimides because they will compete for coupling sites. For example, if DTT were used to reduce disulfides in a protein to make sulfhydryl groups available for conjugation, the DTT would have to be thoroughly removed using a desalting column before initiating the maleimide reaction. Interestingly, the disulfide-reducing agent tris(2-carboxyethyl) phosphine (TCEP) does not contain thiols and does not have to be removed before reactions involving maleimide reagents.

[0428] Excess maleimides can be quenched at the end of a reaction by adding free thiols. ethylenediaminetetraacetic acid (EDTA) can be included in the coupling buffer to chelate stray divalent metals that otherwise promote oxidation of sulfhydryls (non-reactive).

[0429] In one aspect, the linking comprises treating the EV (e.g., exosome) with a reducing agent. Suitable reducing agents include, for example, TCEP (tris(2-carboxyethyl) phosphine), DTT (dithiothreitol), BME (2-mercaptoethanol), a thiolating agent, and any combination thereof. The thiolating agent can comprise, e.g., Traut's reagent (2-iminothiolane).

[0430] After the treatment with the reducing agent, the linking reaction further comprises bringing the reduced EV (e.g., exosome) in contact with the maleimide moiety. In one aspect, the maleimide moiety is linked to a biologically active molecule prior to the linking to the EV (e.g., exosome). In some aspects, the maleimide moiety is further attached to a linker to connect the maleimide moiety to the biologically active molecule. Accordingly, in some aspects, one or more linkers or spacers are interposed between the maleimide moiety and the biologically active molecule.

[0431] Any of the anchoring moieties AM, spacer SP or spacer combinations, or biologically active molecules BAM disclosed herein can be conjugated to a reactive moiety, e.g., an amino reactive moiety (e.g., NHS-ester, p-nitrophenol, isothiocyanate, isocyanate, or aldehyde), a thiol reactive moiety (e.g., acrylate, maleimide, or pyridyl disulfide), a hydroxy reactive moiety (e.g., isothiocyanate or isocyanate), a carboxylic acid reactive moiety (e.g., epoxide), or an azide reactive moiety (e.g., alkyne). Reactive groups include carboxy, activated ester, sulfonyl halide, sulfonate ester, isocyanate, isothiocyanate, epoxide, aziridine, halide, aldehyde, ketone, amine, acrylamide, thiol, acyl azide, acyl halide, hydrazine, hydroxylamine, alkyl halide, imidazole, pyridine, phenol, alkyl sulfonate, halotriazine, imido ester, maleimide, hydrazide, hydroxy, and photo-reactive azido aryl groups. Activated esters, as understood in the art, generally include esters of succinimidyl, benzotriazolyl, or aryl substituted by electron-withdrawing groups such as sulfo, nitro, cyano, or halo groups; or carboxylic acids activated by carbodiimides.

[0432] Exemplary reactive groups that can be used to covalently bind two components disclosed herein (e.g., an anchoring moiety AM and a spacer SP, two spacers SP, a spacer SP and a biologally active molecule BAM, or an anchoring moiety AM and a biologically acitve moiety BAM) via chemical conjugation include, e.g., N-succinimidyl-3-(2-pyridyldithio) propionate, N-4-maleimide butyric acid, S-(2-pyridyldithio) cysteamine, iodoacetoxysuccinimide, N-(4-maleimidebutyryl oxy) succinimide, N-[5-(3′-maleimide propylamide)-1-carboxypentyl] iminodiacetic acid, N-(5-aminopentyl) iminodiacetic acid, and 1′-[(2-cyanoethyl)-(N,N-diisopropyl)]-phosphoramidite). Bifunctional linkers (linkers containing two reactive groups) are also usable.

[0433] In some aspects, an anchoring moiety AM, spacer SP, or biologically active molecule BAM can comprise a terminal oxyamino group (—ONH₂), a hydrazino group (—NHNH₂), a mercapto group (i.e., SH or thiol), or an olefin (e.g., —CH—CH₂). In some aspects, an anchoring moiety AM, spacer SP, or biologically active molecule BAM can comprise e.g., at a terminal position, an electrophilic moiety, such as an aldehyde, alkyl halide, mesylate, tosylate, nosylate, or brosylate, or an activated carboxylic acid ester (e.g., an NHS ester, a phosphoramidite, or a pentafluorophenyl ester).

[0434] The term “protecting group,” as used herein, refers to a labile chemical moiety which is known in the art to protect reactive groups, including without limitation, hydroxyl, amino and thiol groups, against undesired reactions during synthetic procedures. Protecting groups are typically used selectively and/or orthogonally to protect sites during reactions at other reactive sites and can then be removed to leave the unprotected group as is or available for further reactions. Protecting groups as known in the art are described generally in Greene and Wuts, Protective Groups in Organic Synthesis, 3rd edition, John Wiley & Sons, New York (1999).

[0435] Additionally, the various synthetic steps can be performed in an alternate sequence or order to give the desired compounds. Synthetic chemistry transformations and protecting group methodologies (protection and deprotection) useful in synthesizing the compounds described herein are known in the art and include, for example, those such as described in R. Larock, Comprehensive Organic Transformations, VCH Publishers (1989); T. W. Greene and P. G. M. Wuts, Protective Groups in Organic Synthesis, 2d. Ed., John Wiley and Sons (1991); L. Fieser and M. Fieser, Fieser and Fieser's Reagents for Organic Synthesis, John Wiley and Sons (1994); and L. Paquette, ed., Encyclopedia of Reagents for Organic Synthesis, John Wiley and Sons (1995), and subsequent editions thereof.

[0436] Amine reactive moieties: In some aspects, the reactive moiety is an amine reactive moiety. As used herein the term “amine reactive moiety” refers to a chemical group that can react with a reactive group having an amino moiety, e.g., a primary amine. Exemplary amine reactive moieties are N-hydroxysuccinimide esters (NHS-ester), p-nitrophenol, isothiocyanate, isocyanate, and aldehyde. Alternative reactive moieties that react with primary amines are also well known in the art. In some aspects, an amine reactive moiety can be attached to a terminal position of an anchoring moiety AM, spacer SP, or biologically active molecule BAM of the present disclosure. In some aspects, the amine reactive moiety is a NHS-ester. Typically, a NHS-ester reactive moiety reacts with a primary amine of a reactive group to yield a stable amide bond and N-hydroxysuccinimide (NHS). In some aspects, the amine reactive moiety is a p-nitrophenol group. Typically, a p-nitrophenol reactive moiety is an activated carbamate that reacts with a primary amine of a reactive group to yield a stable carbamate moiety and p-nitrophenol. In some aspects, the amine reactive moiety is an isothiocyanate. Typically, an isothiocyanate reacts with a primary amine of a reactive group to yield a stable thiourea moiety. In some aspects, the amine reactive moiety is an isocyanate. Typically, an isocyanate reacts with a primary amine of a reactive group to yield a stable urea moiety. In some aspects, amine the reactive moiety is an aldehyde. Typically, aldehydes react with primary amines to form Schiff bases which can be further reduced to form a covalent bond through reductive amination.

[0437] Thiol reactive moieties: In some aspects, the reactive moiety is a thiol reactive moiety. As used herein the term “thiol reactive moiety” refers to a chemical group that can react with a reactive group having a thiol moiety (or mercapto group). Exemplary thiol reactive moieties are acrylates, maleimides, and pyridyl disulfides. Alternative reactive moieties that react with thiols are also well known in the art. In some aspects, a thiol reactive moiety can be attached to a terminal position of an anchoring moiety AM, spacer SP, or biologically active molecule BAM of the present disclosure. In some aspects, the thiol reactive moiety is an acrylate. Typically, acrylates react with thiols at the carbon B to the carbonyl of the acrylate to form a stable sulfide bond. In some aspects, the thiol reactive moiety is a maleimide. Typically, maleimides react with thiols at either the carbon B or the carbonyls to form a stable sulfide bond. In some aspects, the thiol reactive moiety is a pyridyl disulfide. Typically, pyridyl disulfides react with thiols at the sulfur atom β to the pyridyl to form a stable disulfide bond and pyridine-2-thione.

[0438] Hydroxy reactive moieties: In some aspects, the reactive moiety is a hydroxyl reactive moiety. As used herein the term “hydroxyl reactive moiety” refers to a chemical group that can react with a reactive group having a hydroxyl moiety. Exemplary hydroxyl reactive moieties are isothiocyanates and isocyanates. Alternative reactive moieties that react with hydroxyl moieties are also well known in the art. In some aspects, a hydroxyl reactive moiety can be attached to a terminal position of an anchoring moiety AM, spacer SP, or biologically active molecule BAM of the present disclosure. In some aspects, the hydroxyl reactive moiety is an isothiocyanate. Typically, an isothiocyanate reacts with a hydroxyl of a reactive group to yield a stable carbamothioate moiety. In some aspects, amine the reactive moiety is an isocyanate. Typically, an isocyanate reacts with a hydroxyl of a reactive group to yield a stable carbamate moiety.

[0439] Carboxylic acid reactive moieties: In some aspects, the reactive moiety is a carboxylic acid reactive moiety. As used herein the term “carboxylic acid reactive moiety” refers to a chemical group that can react with a reactive group having a carboxylic acid moiety. An exemplary carboxylic acid reactive moiety is an epoxide. Alternative reactive moieties that react with carboxylic acid moieties are also well known in the art. In some aspects, a carboxylic acid reactive moiety can be attached to a terminal position of an anchoring moiety AM, spacer SP, or biologically active molecule BAM of the present disclosure. In some aspects, the carboxylic acid reactive moiety is an epoxide. Typically, an epoxide reacts with the carboxylic acid of a reactive group at either of the carbon atoms of the epoxide to form a 2-hydroxyethyl acetate moiety.

[0440] Azide reactive moieties: In some aspects, the reactive moiety is an azide reactive moiety. As used herein the term “azide reactive moiety” refers to a chemical group that can react with a reactive group having an azide moiety. An exemplary azide reactive moiety is an alkyne. Alternative reactive moieties that react with azide moieties are also well known in the art. In some aspects, a carboxylic acid reactive moiety can be attached to a terminal position of an anchoring moiety AM, spacer SP, or biologically active molecule BAM of the present disclosure. In some aspects, the azide reactive moiety is an alkyne. Typically, an alkyne reacts with the azide of a reactive group through a 1,3-dipolar cycloaddition reaction, also referred to “click chemistry,” to form a 1,2,3-triazole moiety.

[0441] In some aspects, the exosomes disclosed herein can be prepared and/or stored under conditions that preserve the stability of the exosome and/or promote higher load density. In some aspects, an exosome comprising an ASO attached to its surface via a membrane anchoring construct of Formula I or II can be maintained in a low salt buffer (e.g., comprising about 150 mM NaCl) for about 2, 4, 6, or 8 days. In some aspects, an exosome comprising an ASO attached to its surface via a membrane anchoring construct of Formula I or II comprising cholesterol as the anchoring moiety can be maintained in a low salt buffer, high salt buffer, or high salt buffer (e.g., comprising about 150 mM NaCl) further comprising sucrose for about 2, 4, 6, or 8 days, at either 4° C. or 25° C.

[0442] The present disclosure also provides a method to increase the loading density of an exosome comprising loading the exosome under high salt conditions (e.g., using a high salt buffer comprising about 150 mM NaCl). In some aspects, the exosome is loaded with an ASO attached (e.g., covalently attached) via a membrane anchoring construct of Formula I or II.

### Therapeutic Uses

[0443] The present disclosure provides methods of treating a disease or condition in a subject in need thereof comprising administering a composition comprising EVs (e.g., exosomes) of the present disclosure to the subject. The present disclosure also provides methods of preventing or ameliorating the symptoms of a disease or condition is a subject in need thereof comprising administering a composition comprising EVs (e.g., exosomes) of the present disclosure to the subject. The present disclosure also provides methods to diagnose a disease or condition in a subject in need thereof comprising administering a composition comprising EVs (e.g., exosomes) of the present disclosure to the subject.

[0444] The present disclosure also provides methods of preventing and/or treating a disease or disorder in a subject in need thereof, comprising administering an EV (e.g., exosome) of the present disclosure to the subject. In some aspects, a disease or disorder that can be treated with the present methods comprises a cancer, graft-versus-host disease (GvHD), an autoimmune disease, an infectious disease, a fibrotic disease, an inflammatory disease, a neurodegenerative disorder, a central nervous disease, a muscular dystrophy disease, or a metabolic disease. In some aspects, the treatment is prophylactic. In other aspects, the EVs (e.g., exosomes) of the present disclosure are used to induce an immune response. In other aspects, the EVs (e.g., exosomes) for the present disclosure are used to vaccinate a subject.

[0445] In some aspects, the disease or disorder is a cancer. When administered to a subject with a cancer, in certain aspects, EVs (e.g., exosomes) of the present disclosure can up-regulate an immune response and enhance the tumor targeting of the subject's immune system. In some aspects, the cancer being treated is characterized by infiltration of leukocytes (T-cells, B-cells, macrophages, dendritic cells, monocytes) into the tumor microenvironment, or so-called “hot tumors” or “inflammatory tumors.” In some aspects, the cancer being treated is characterized by low levels or undetectable levels of leukocyte infiltration into the tumor microenvironment, or so-called “cold tumors” or “non-inflammatory tumors.” In some aspects, an EV (e.g., exosome) is administered in an amount and for a time sufficient to convert a “cold tumor” into a “hot tumor,” i.e., the administering results in the infiltration of leukocytes (such as T-cells) into the tumor microenvironment. In certain aspects, the cancer comprises bladder cancer, cervical cancer, renal cell cancer, breast cancer, prostate cancer, testicular cancer, colorectal cancer, lung cancer, head and neck cancer, ovarian cancer, lymphoma, pancreatic cancer, liver cancer, glioblastoma, melanoma, myeloma, leukemia, or combinations thereof. In other aspects, the terms “distal tumor” or “distant tumor” refer to a tumor that has spread from the original (or primary) tumor to distant organs or distant tissues, e.g., lymph nodes. In some aspects, the EVs (e.g., exosomes) of the disclosure can treat a tumor after the metastatic spread.

[0446] In some aspects, the disease or disorder is a graft-versus-host disease (GvHD).

[0447] In some aspects, the disease or disorder that can be treated with the present disclosure is an autoimmune disease. Non-limiting examples of autoimmune diseases include: multiple sclerosis, peripheral neuritis, Sjogren's syndrome, rheumatoid arthritis, alopecia, autoimmune pancreatitis, Behcet's disease, bullous pemphigoid, celiac disease, Devic's disease (neuromyelitis optica), glomerulonephritis, IgA nephropathy, assorted vasculitides, scleroderma, diabetes, arteritis, vitiligo, ulcerative colitis, irritable bowel syndrome, psoriasis, uveitis, systemic lupus erythematosus, and combinations thereof.

[0448] In some aspects, the disease or disorder that can be treated with the present disclosure is an inflammatory disease. Non-limiting examples of inflammatory diseases include inflammation, fatty liver disease, endometriosis, type I diabetes, type II diabetes, inflammatory bowel disease, asthma, rheumatoid arthritis, psoriatic arthritis, Gouty arthritis, obesity, chronic peptic ulcer, ulcerative colitis, sinusitis, active hepatits, psoriasis, chronic obstructive pulmonary disease (COPD), allergies, bronchitis, and appendicitis.

[0449] In some aspects, the disease or disorder that can be treated with the present disclosure is a central nervous system (CNS) disease. Non-limiting examples of CNS diseases include Alzheimer's disease, Bell's palsy, cerebral palsy, epilepsy, motor neurone disease, multiple sclerosis, neurofibromatoriss, Parkinson's disease, sciatica, shingles, stroke, transiet ischemic attack, subdural hemorrhage, hematoma, meningitis, encephalitis, polio, epidural abcess, cervical spondylosis, capral tunnel syndrome, peripheral neuropathy, Guillan-Barre syndrome, headache, neuralgia, amyotrophic lateral sclerosis, and Huntington chorea.

[0450] In some aspects, the disease or disorder that can be treated with the present disclosure is a fibrotic disease. Non-limiting examples of fibrotic diseases include pulmonary fibrosis, liver fibrosis, heart fibrosis, mediastinal fibrosis, bone marrow fibrosis, skin fibrosis, scleroderma, retroperitoneal cavity fibrosis, and keloids.

[0451] In some aspects, the disease or disorder is an infectious disease. In certain aspects, the disease or disorder is an oncogenic virus. In some aspects, infectious diseases that can be treated with the present disclosure includes, but not limited to, human Gamma herpes virus 4 (Epstein Barr virus), influenza A virus, influenza B virus, cytomegalovirus, Staphylococcus aureus, Mycobacterium tuberculosis, Chlamydia trachomatis, HIV-1, HIV-2, a corona virus (e.g., MERS-CoV and SARS COV), a filovirus (e.g., Marburg and Ebola), Streptococcus pyogenes, Streptococcus pneumoniae, Plasmodia species (e.g., vivax and falciparum), Chikunga virus, human Papilloma virus (HPV), hepatitis B, hepatitis C, human herpes virus 8, herpes simplex virus 2 (HSV2), Klebsiella spp., Pseudomonas aeruginosa, Enterococcus spp., Proteus spp., Enterobacter spp., Actinomycetota (Actinobacter) sp., coagulase-negative staphylococci (CoNS), Mycoplasma sp., or combinations thereof.

[0452] In some aspects, a disease or disorder that can be treated with the present methods comprises Pompe disease, Gaucher disease, a lysosomal storage disorder, mucovicidosis, cystic fibrosis, Duchenne muscular dystrophy, Becker muscular dystrophy, transthyretin amyloidosis, hemophilia A, hemophilia B, adenosine-deaminase deficiency, Leber's congenital amaurosis, X-linked adrenoleukodystrophy, metachromatic leukodystrophy, ornithine transcarbamylase (OTC) deficiency, glycogen storage disease 1A, Criggler-Najjar syndrome, primary hyperoxaluria type 1, acute intermittent porphyria, phenylketonuria, familial hypercholesterolemia, mucopolysaccharidosis type VI, al antitrypsin deficiency, Rett Syndrome, Dravet Syndrome, Angelman Syndrome, DM1 disease, Fragile X disease, Huntington's Disease, Friedreich's ataxia, Charcot-Marie-Tooth (CMT) disease (also known as hereditary motor and sensory neuropathy (HMSN) or peroneal muscular atrophy), CMT1X (Charcot-Marie-Tooth type 1X) disease, catecholaminergic polymorphic ventricular tachycardia, spinocerebellar ataxia type 3 (SCA3) disease, limb-girdle muscular dystrophy, or a hypercholesterolemia. In some aspects, the treatment of such disease or disorder is prophylactic.

[0453] In some aspects, the disease or disorder is a neurodegenerative disease. In some aspects, the neurodegenerative disease is selected from Alzheimer's disease, Parkinson's disease, a prion disease, a motor neuron disease, Huntington's disease, spinocerebellar ataxia, spinal muscular atrophy, and any combination thereof.

[0454] In certain aspects, the disease or disorder comprises a muscular dystrophy. In some aspects, the muscular dystrophy is selected from Duchenne type muscular dystrophy (DMD), myotonic muscular dystrophy, facioscapulohumeral muscular dystrophy (FSHD), congenital muscular dystrophy, limb-girdle muscular dystrophy (including, but not limited to, LGMD2B, LGMD2D, LGNMD2L, LGMD2C, LGMD2E and LGMD2A), and any combination thereof.

[0455] In some aspects, the disease or disorder is selected from aromatic L-amino acid decarboxylase (AADC) deficiency (CNS), adenosine deaminase severe combined immunodeficiency (ADA-SCID), Alpha-1 antitrypsin deficiency, β-thalassemia (severe sickle cell), Cancer (head and neck squamous cell), Niemman-Pick Type C Disease, Cerebral ALD, Choroideremia, Congestive heart failure, Cystic Fibrosis, Duchenne muscular dystrophy (DMD), Fabry disease, Glaucoma, Glioma (cancer), Hemophilia A, Hemophilia B, HoFH (hypercholesterolemia), Huntington's Disease, Lipoprotein lipase deficiency, Leber hereditary optic neuropathy (LHON), Metachromatic leukodystrophy, Mucopolysaccharidosis type I (MPS I-Hurler syndrome), Mucopolysaccharidosis type II (MPS II-Hunter's syndrome), Mucopolysaccharidosis type III (MPS III-Sanfilippo Syndrome), Mucopolysaccharidosis type IIIA (MPS IIIA), Parkinson's disease, Pompe Disease, Recessive Dystrophic Epidermolysis Bullosa, RPE65 gene deficiency (vision loss), spinal muscular atrophy (SMA I), wet age-related macular degeneration (wet AMD), Wiskott Aldrich syndrome (WAS), X-linked myotubular myopathy, X-linked retinitis pigmentosa, and any combination thereof.

### Pharmaceutical Compositions and Methods of Administration

[0456] The present disclosure also provides pharmaceutical compositions comprising EVs (e.g., exosomes) of the present disclosure that are suitable for administration to a subject. The pharmaceutical compositions generally comprise a plurality of EVs (e.g., exosomes) comprising a biologically active molecule covalently linked to the plurality of EVs (e.g., exosomes) via a cleavable linker disclosed herein and a pharmaceutically-acceptable excipient or carrier in a form suitable for administration to a subject. Pharmaceutically acceptable excipients or carriers are determined in part by the particular composition being administered, as well as by the particular method used to administer the composition. Accordingly, there is a wide variety of suitable formulations of pharmaceutical compositions comprising a plurality of EVs (e.g., exosomes). See, e.g., Remington's Pharmaceutical Sciences, Mack Publishing Co., Easton, Pa. 18th ed. (1990). The pharmaceutical compositions are generally formulated sterile and in full compliance with all Good Manufacturing Practice (GMP) regulations of the U.S. Food and Drug Administration. In some aspects, the pharmaceutical composition comprises one or more chemical compounds, such as for example, small molecules covalently linked to an EV (e.g., exosome) of the present disclosure.

[0457] The present disclosure provides pharmaceutical compositions comprising an EV (e.g., exosome) of the present disclosure having the desired degree of purity, and a pharmaceutically acceptable carrier or excipient, in a form suitable for administration to a subject. Pharmaceutically acceptable excipients or carriers can be determined in part by the particular composition being administered, as well as by the particular method used to administer the composition. Accordingly, there is a wide variety of suitable formulations of pharmaceutical compositions comprising a plurality of extracellular vesicles. (See, e.g., Remington's Pharmaceutical Sciences, Mack Publishing Co., Easton, Pa. 21st ed. (2005)). The pharmaceutical compositions are generally formulated sterile and in full compliance with all Good Manufacturing Practice (GMP) regulations of the U.S. Food and Drug Administration.

[0458] Acceptable carriers, excipients, or stabilizers are nontoxic to recipients (e.g., animals or humans) at the dosages and concentrations employed, and include buffers, such as phosphate, citrate, and other organic acids; antioxidants including ascorbic acid and methionine; preservatives (such as octadecyldimethylbenzyl ammonium chloride; hexamethonium chloride; benzalkonium chloride, benzethonium chloride; phenol, butyl or benzyl alcohol; alkyl parabens such as methyl or propyl paraben; catechol; resorcinol; cyclohexanol; 3-pentanol; and m-cresol); low molecular weight polypeptides (e.g., about 10 or less amino acid residues); proteins, such as serum albumin, gelatin, or immunoglobulins; hydrophilic polymers such as polyvinylpyrrolidone; amino acids such as glycine, glutamine, asparagine, histidine, arginine, or lysine; monosaccharides, disaccharides, and other carbohydrates including glucose, mannose, or dextrins; chelating agents such as EDTA; sugars such as sucrose, mannitol, trehalose or sorbitol; salt-forming counter-ions such as sodium; metal complexes (e.g., Zn-protein complexes); and/or non-ionic surfactants such as a polysorbate (e.g., polysorbate 20, polysorbate 80), a poloxamer (e.g., block copolymers which consist of hydrophilic poly(ethylene oxide)(PEO) and hydrophobic poly(propylene oxide)(PPO), arranged in an A-B-A triblock structure to form PEO-PPO-PEO, such as those sold as PLURONIC™), or polyethylene glycol (PEG).

[0459] Examples of carriers or diluents include, but are not limited to, water, saline, Ringer's solutions, dextrose solution, and 5% human serum albumin. The use of such media and compounds for pharmaceutically active substances is well known in the art. Except insofar as any conventional media or compound is incompatible with the extracellular vesicles described herein, use thereof in the compositions is contemplated.

[0460] Typically, a pharmaceutical composition is formulated to be compatible with its intended route of administration. The EVs (e.g., exosomes) of the present disclosure can be administered by parenteral, topical, intravenous, oral, subcutaneous, intra-arterial, intradermal, transdermal, rectal, intracranial, intraperitoneal, intranasal, intratumoral, intrathecal, intraocular, intramuscular routes or as inhalants. In certain aspects, the pharmaceutical composition comprising EVs (e.g., exosomes) is administered intravenously, e.g., by injection.

[0461] In some aspects, the EVs (e.g., exosomes) are administered intravenously to the circulatory system of a subject. In some aspects, the EVs (e.g., exosomes) are infused in suitable liquid and administered into a vein of a subject. In some aspects, the EVs (e.g., exosomes) are administered intra-arterialy to the circulatory system of a subject. In some aspects, the EVs (e.g., exosomes) are infused in suitable liquid and administered into an artery of a subject. In some aspects, the EVs (e.g., exosomes) are administered to the subject by intrathecal administration. In some aspects, the EVs (e.g., exosomes) are administered via an injection into the spinal canal, or into the subarachnoid space so that it reaches the cerebrospinal fluid (CSF). In some aspects, the EVs (e.g., exosomes) are administered intratumorally into one or more tumors of a subject. In some aspects, the EVs (e.g., exosomes) are administered to a subject by intranasal administration. In some aspects, the EVs (e.g., exosomes) can be insufflated through the nose in a form of either topical administration or systemic administration. In certain aspects, the EVs (e.g., exosomes) are administered as nasal spray. In some aspects, the EVs (e.g., exosomes) are administered to the subject by intraperitoneal administration. In some aspects, the EVs (e.g., exosomes) are infused in suitable liquid and injected into the peritoneum of the subject. In some aspects, the intraperitoneal administration results in distribution of the EVs (e.g., exosomes) to the lymphatics. In some aspects, the intraperitoneal administration results in distribution of the EVs (e.g., exosomes) to the thymus, spleen, and/or bone marrow. In some aspects, the intraperitoneal administration results in distribution of the EVs (e.g., exosomes) to one or more lymph nodes. In some aspects, the intraperitoneal administration results in distribution of the EVs (e.g., exosomes) to one or more of the cervical lymph node, the inguinal lymph node, the mediastinal lymph node, or the sternal lymph node. In some aspects, the intraperitoneal administration results in distribution of the EVs (e.g., exosomes) to the pancreas. In some aspects, the EVs (e.g., exosomes) are administered to the subject by periocular administration. In some aspects, the EVs (e.g., exosomes) are injected into the periocular tissues. Periocular drug administration includes the routes of subconjunctival, anterior sub-Tenon's, posterior sub-Tenon's, and retrobulbar administration.

[0462] Solutions or suspensions can include the following components: a sterile diluent such as water, saline solution, fixed oils, polyethylene glycols, glycerine, propylene glycol or other synthetic solvents; antibacterial compounds such as benzyl alcohol or methyl parabens; antioxidants such as ascorbic acid or sodium bisulfite; chelating compounds such as ethylenediaminetetraacetic acid (EDTA); buffers such as acetates, citrates or phosphates, and compounds for the adjustment of tonicity, such as sodium chloride or dextrose. The pH can be adjusted with an acid or base, such as hydrochloric acid or sodium hydroxide. The preparation can be enclosed in ampoules, disposable syringes, or multiple dose vials made of glass or plastic.

[0463] Pharmaceutical compositions suitable for injectable use include sterile aqueous solutions (if water soluble) or dispersions and sterile powders. For intravenous administration, suitable carriers include physiological saline, bacteriostatic water, a mixture of polyoxyethylated triglycerides made by reacting ethylene oxide with castor oil (e.g., Cremophor EL™ (BASF, Parsippany, NJ)) or phosphate buffered saline (PBS). The composition is generally sterile and fluid to the extent that easy syringeability exists. The carrier can be a solvent or dispersion medium containing, e.g., water, ethanol, polyol (e.g., glycerol, propylene glycol, or liquid polyethylene glycol, and the like), and suitable mixtures thereof. The proper fluidity can be maintained, e.g., by the use of a coating such as lecithin, by the maintenance of the required particle size in the case of dispersion and by the use of surfactants. Prevention of the action of microorganisms can be achieved by various antibacterial and antifungal compounds, e.g., parabens, chlorobutanol, phenol, ascorbic acid, thimerosal, and the like. If desired, isotonic compounds, e.g., sugars, polyalcohols, such as mannitol, sorbitol, and sodium chloride can be added to the composition. Prolonged absorption of the injectable compositions can be brought about by including in the composition a compound which delays absorption, e.g., aluminum monostearate and gelatin.

[0464] Sterile injectable solutions can be prepared by incorporating the EVs (e.g., exosomes) of the present disclosure in an effective amount and in an appropriate solvent with one or a combination of ingredients enumerated herein, as desired. Generally, dispersions are prepared by incorporating the EVs (e.g., exosomes) into a sterile vehicle that contains a basic dispersion medium and any desired other ingredients. In the case of sterile powders for the preparation of sterile injectable solutions, methods of preparation are vacuum drying and freeze-drying that yields a powder of the active ingredient plus any additional desired ingredient from a previously sterile-filtered solution thereof. The EVs (e.g., exosomes) can be administered in the form of a depot injection or implant preparation which can be formulated in such a manner to permit a sustained or pulsatile release of the EVs (e.g., exosomes).

[0465] Systemic administration of compositions comprising EVs (e.g., exosomes) of the present disclosure can also be by transmucosal means. For transmucosal administration, penetrants appropriate to the barrier to be permeated are used in the formulation. Such penetrants are generally known in the art, and include, e.g., for transmucosal administration, detergents, bile salts, and fusidic acid derivatives. Transmucosal administration can be accomplished through the use of, e.g., nasal sprays.

[0466] In certain aspects the pharmaceutical composition comprising EVs (e.g., exosomes) of the present disclosure is administered intravenously into a subject that would benefit from the pharmaceutical composition. In certain other aspects, the composition is administered to the lymphatic system, e.g., by intralymphatic injection or by intranodal injection (see e.g., Senti et al., PNAS 105 (46): 17908 (2008)), or by intramuscular injection, by subcutaneous administration, by intratumoral injection, by direct injection into the thymus, or into the liver.

[0467] In certain aspects, the pharmaceutical composition comprising EVs (e.g., exosomes) of the present disclosure is administered as a liquid suspension. In certain aspects, the pharmaceutical composition is administered as a formulation that is capable of forming a depot following administration. In certain preferred aspects, the depot slowly releases the EVs (e.g., exosomes) into circulation, or remains in depot form.

[0468] Typically, pharmaceutically-acceptable compositions are highly purified to be free of contaminants, are biocompatible and not toxic, and are suited to administration to a subject. If water is a constituent of the carrier, the water is highly purified and processed to be free of contaminants, e.g., endotoxins.

[0469] In some aspects, the pharmaceutically-acceptable carrier can comprise lactose, dextrose, sucrose, sorbitol, mannitol, starch, gum acacia, calcium phosphate, alginates, gelatin, calcium silicate, micro-crystalline cellulose, polyvinylpyrrolidone, cellulose, water, syrup, methyl cellulose, methylhydroxy benzoate, propylhydroxy benzoate, talc, magnesium stearate, and/or mineral oil, but is not limited thereto. The pharmaceutical composition can further include a lubricant, a wetting agent, a sweetener, a flavor enhancer, an emulsifying agent, a suspension agent, and/or a preservative.

[0470] In certain aspects, the preparation of EVs (e.g., exosomes) of the present disclosure is subjected to radiation, e.g., X rays, gamma rays, beta particles, alpha particles, neutrons, protons, elemental nuclei, UV rays in order to damage residual replication-competent nucleic acids. In certain aspects, the preparation of EVs (e.g., exosomes) of the present disclosure is subjected to gamma irradiation using an irradiation dose of more than 1, 5, 10, 15, 20, 25, 30, 35, 40, 50, 60, 70, 80, 90, 100, or more than 100 kGy. In certain aspects, the preparation of EVs (e.g., exosomes) of the present disclosure,, is subjected to X-ray irradiation using an irradiation dose (Gy) of more than 0.1, 0.5, 1, 5, 10, 15, 20, 25, 30, 35, 40, 50, 60, 70, 80, 90, 100, 200, 300, 400, 500, 600, 700, 800, 900, 1000, 2000, 3000, 4000, 5000, 6000, 7000, 8000, 9000, or 10,000 Gy.

[0471] In some aspects, a pharmaceutical composition comprises one or more therapeutic agents and an EV (e.g., exosome) of the present disclosure, i.e., an EV comprising a cleavable linker disclosed herein. In certain aspects, the EVs (e.g., exosomes) are co-administered with of one or more additional therapeutic agents, in a pharmaceutically acceptable carrier. In some aspects, the pharmaceutical composition comprising the EV (e.g., exosome) is administered prior to administration of the additional therapeutic agents. In an aspect, the additional therapeutic agent can be a nucleic acid agent or a small molecule therapeutic agent, such as a hormonal therapeutic agent, a chemotherapeutic agent, an immunotherapeutic agent, an anti-inflammatory agent, or a medicament that inhibits the action of cell growth factors or cell growth factor receptors. In other aspects, the pharmaceutical composition comprising the EV (e.g., exosome) is administered after the administration of the additional therapeutic agents. In further aspects, the pharmaceutical composition comprising the EV (e.g., exosome) is administered concurrently with the additional therapeutic agents.

### Kits

[0472] The present disclosure also provides a kit comprising one or more EVs (e.g., exosomes) of the present disclosure and instructions for use. In some aspects, the kit, or product of manufacture contains a pharmaceutical composition described herein, which comprises at least one EV (e.g., exosome) of the present disclosure and instructions for use. In some aspects, the kit, or product of manufacture comprises at least one EV (e.g., exosome) of the present disclosure or a pharmaceutical composition comprising the EVs (e.g., exosomes) in one or more containers. One skilled in the art will readily recognize that the EVs (e.g., exosomes) of the present disclosure, pharmaceutical composition comprising the EVs (e.g., exosomes) of the present disclosure or combinations thereof can be readily incorporated into one of the established kit formats which are well known in the art.

[0473] In some aspects, the kit comprises EVs (e.g., exosomes) comprising one or more biologically active molecules, reagents to covalently attach the one or more biologically active molecules to the EVs (e.g., exosomes) via a cleavable linker, as disclosed herein, e.g., via conjugation or solid phase synthesis, and instructions to conduct the reaction to covalently attach the one or more biologically active molecules to the EVs (e.g., exosomes) via a cleavable linker disclosed herein.

[0474] The practice of the present disclosure will employ, unless otherwise indicated, conventional techniques of cell biology, cell culture, molecular biology, transgenic biology, microbiology, recombinant DNA, and immunology, which are within the skill of the art. Such techniques are explained fully in the literature. See, for example, Sambrook et al., ed. (1989) Molecular Cloning A Laboratory Manual (2nd ed.; Cold Spring Harbor Laboratory Press); Sambrook et al., ed. (1992) Molecular Cloning: A Laboratory Manual, (Cold Springs Harbor Laboratory, NY); D. N. Glover ed., (1985) DNA Cloning, Volumes I and II; Gait, ed. (1984) Oligonucleotide Synthesis; Mullis et al. U.S. Pat. No. 4,683,195; Hames and Higgins, eds. (1984) Nucleic Acid Hybridization; Hames and Higgins, eds. (1984) Transcription And Translation; Freshney (1987) Culture Of Animal Cells (Alan R. Liss, Inc.); Immobilized Cells And Enzymes (IRL Press)(1986); Perbal (1984) A Practical Guide To Molecular Cloning; the treatise, Methods In Enzymology (Academic Press, Inc., N.Y.); Miller and Calos eds. (1987) Gene Transfer Vectors For Mammalian Cells, (Cold Spring Harbor Laboratory); Wu et al., eds., Methods In Enzymology, Vols. 154 and 155; Mayer and Walker, eds. (1987) Immunochemical Methods In Cell And Molecular Biology (Academic Press, London); Weir and Blackwell, eds., (1986) Handbook Of Experimental Immunology, Volumes I-IV; Manipulating the Mouse Embryo, Cold Spring Harbor Laboratory Press, Cold Spring Harbor, N.Y., (1986);); Crooke, Antisense drug Technology: Principles, Strategies and Applications, 2nd Ed. CRC Press (2007) and in Ausubel et al. (1989) Current Protocols in Molecular Biology (John Wiley and Sons, Baltimore, Md.).

[0475] All publications, patent applications, patents, and other references mentioned herein are incorporated by reference in their entirety. Database entries and electronic publications disclosed in the present disclosure are incorporated by reference in their entireties. The version of the database entry or electronic publication incorporated by reference in the present application is the most recent version of the database entry or electronic publication that was publicly available at the time the present application was filed. The database entries corresponding to gene or protein identifiers (e.g., genes or proteins identified by an accession number or database identifier of a public database such as Genbank, Refseq, or Uniprot) disclosed in the present application are incorporated by reference in their entireties. The gene or protein-related incorporated information is not limited to the sequence data contained in the database entry. The information incorporated by reference ncludes the entire contents of the database entry in the most recent version of the database that was publicly available at the time the present application was filed. In case of conflict, the present specification, including definitions, will control. In addition, the materials, methods, and examples are illustrative only and not intended to be limiting.

### EXAMPLES

[0476] The following examples are provided for illustrative purposes only, and are not to be construed as limiting the scope or content of the invention in any way. The practice of the current invention will employ, unless otherwise indicated, conventional methods of protein chemistry, biochemistry, recombinant DNA techniques and pharmacology, within the skill of the art. Such techniques are explained fully in the literature. See, e.g., T.E. Creighton, Proteins: Structures and Molecular Properties (W.H. Freeman and Company, 1993); Green & Sambrook et al., Molecular Cloning: A Laboratory Manual, 4th Edition (Cold Spring Harbor Laboratory Press, 2012); Colowick & Kaplan, Methods in Enzymology (Academic Press); Remington: The Science and Practice of Pharmacy, 22nd Edition (Pharmaceutical Press, 2012); Sundberg & Carey, Advanced Organic Chemistry: Parts A and B, 5th Edition (Springer, 2007).

### Example 1

[0477] This example describes the the loading of lipid-linker-ASO (-CPP), and the purification of exoASO.

[0478] The following materials were prepared.

[0479] Buffer CEF-01:15 mM Na2HPO4, 5 mM KH2PO+, 50 mM NaCl, 5% w/v sucrose, pH 7.2.

[0480] Buffer CEF-05:15 mM Na2HPO4, 5 mM KH2PO4, 150 mM NaCl, 5% w/v sucrose, pH 7.2.

[0481] Buffer CEF-04:15 mM Na2HPO+, 5 mM KH2PO4, 100 mM NaCl, 5% w/v sucrose, pH 7.2.

[0482] ULTRAFREE™-MC centrifugal filter units 0.22 um GV durapore (Millipore #UFC30GVOS, Burlington, MA) CAPTO™ Core 700 resin (50% v/v slurry)(Cytiva #17548102, Marlborough, MA).

[0483] Filter microplate, 96-well, polypropylene, with 0.45 μm polyvinylidene fluoride membrane (Agilent #200959-100, Santa Clara, CA).

[0484] Prepare Lipid-linker-ASO stock solution. Dissolve lipid-linker-ASO (-CPP) solid in CEF-04 buffer, aiming for a 500 μM final concentration. After vortex mixing, the solution was filtered by ULTRAFREE™-MC(Millipore, Burlington, MA) centrifugal filter units at a 2000xg centrifugation speed for 5 min. The actual stock solution concentration was determined by UA absorbance at A260.

[0485] Loading. An equal volume of the lipid-linker-ASO (-CPP) stock solution (350 μL) was fully mixed with exosomes (1.26E13 p/mL, 350 μL) and incubated at 37° C. for 24h. For each example, the ASO sequence was for mouse STAT6 (mSTAT6): 5′-TbsGbsAbsdGs (5MdC)-sdGsdAsdAsdTsdGsdGsdAs (5MdC) sdAsdGsdGsdTsCbsTbsTb-3′ (SEQ ID NO: 1124).

[0486] Purification. Captocore 700 resin (50% v/v slurry, 150 uL) was added into the wells of the filter microplate, followed by the addition of CEF-05 buffer (300 uL). The microplate was then centrifuged at 2000×g for 5 min to remove the storage solution of the resin and equilibrate theresin with CEF-05 buffer. This process was repeated at least 3 times to fully equilibrate the resin.

[0487] The reaction mixture was allowed to cool to room temperature for 30 min. Then it was added to the resin on the filter microplate and mixed on a plate shaker for at least 30 min, which gives sufficient contact time. After that, the microplate was then centrifuged at 2000×g for 5 min and the filtrate (purified exoASO) was collected. The filtrate was then filtered by ULTRAFREE™-MC (Millipore, Burlington, MA) centrifugal filter units at a 2000xg centrifugation speed for 5 min to ensure sterility.

[0488] The purified exoASO was characterized by the following parameters: (i) particle count/concentration/yield by nanoparticle tracking analysis (NTA); (ii) particle size and size distribution by dynamic light scattering (DLS); and (iii) loading density by RIBOGREEN™ assay (QUANT-IT™ RIBOGREEN™ RNA assay kit; Thermofisher, Waltham, MA).

[0489] The average size and polydispersity index (PDI) of the lipid-linker-ASO stock solution are good indicators for aggregation. The lipid part is hydrophobic, and the ASO and CPP parts are hydrophilic. When conjugated together, the lipid-linker-ASO (-CPP) is likely to aggregate. The aggregation is evaluated by average diameter (nm) and PDI by dynamic light scattering (DLS). Lipid-linker-ASO stock solution with an average diameter <20 nm and PDI >0.25 would suggest decent solubility in the reconstitution buffer. Aggregation prevents lipid-linker-ASO from loading to exosomes and can interfere with the resin purification step. The characterization of the lipid-linker-ASO stock solutions are shown in FIG. 3. The solubtilities of exemplary ASOs as a function of the average diameter (nm) of ASO stock solutions are shown in FIG. 4.

[0490] Loaded ASO concentration was characterized by RIBOGREEN™ assay (Thermofisher, Waltham, MA). Particle concentration was measured by NTA. Loading density was calculated by dividing the number of ASO by the number of exosome in a given concentration/volume. The average size and PDI were measured by DLS instrument. PDI<0.25 is the typical distribution for a rather uniform exosome population, meaning that there is no significant aggregation caused by the surface ASO loading. The results are shown in FIG. 5. The loading density of exemplary ASOs/exosome are shown in FIG. 6.

[0491] The loaded ASO concentration characterized by RIBOGREEN™ assay (Thermofisher, Waltham, MA) is useful for determining the dosing for in vitro and in vivo potency assay. The average particle size and the size distribution (PDI value) are important characteristics of exosomes. The surface of exosomes are modified with various ASO with cleavable linkers and cell-penetrating peptides, so it is important to monitor the particle size and distribution to make sure the payload will not have any negative impact on the physiochemical properties of exosomes.

[0492] The loading density of each individual lipid-linker-ASO (-CPP) varied from 886 to 3777, even though the constructures were all loaded to the exosome under the same condition. Different linkers and CPP structures affect the molecular interaction during loading. The hydrophobicity/hydrophilicity of the structures dictate their solubility. In general, if the lipid-linker-ASO (-CPP) showed good aqueous solubility, then it is more likely to result in a higher loading density as well as good filterability.

### Example 2

[0493] The exoASO potency/efficacy was examined by H1299 in vitro assay. H1299 is a lung cancer cell line containing the STAT6 target gene. The cells were allowed to propagate for several days. Once the cells reached the target density, the cells were treated with exoASO. The dosage of exoASO was calculated based on the loaded ASO concentration. After incubating the cells with exoASO for 48-72h at 37° C., the STAT6 gene knockdown was measured as an indicator of potency. H1299 was used as the primary in vitro assay system for high-throughput potency evaluation. Exemplary linkers from the H1299 assay were further evaluated in macrophage.

[0494] The IC₅₀ values of exemplary exoASOs modified with various cleavable linker and/or a cell penetrating peptide (CPP) compared to a control 5′-Chol-TEG-HEG with a phosphodiester linkage are set forth in FIG. 7.

[0495] Cleavable linkers provide potency increase for exoASO. Each cleavable linker mechanism has a unique impact on the potency. As seen in FIG. 8, the degree of potency enhancement driven by the lipid and cleavable linker modifications follow this order: Phospholipid-SS >Chol-Val-Citrulline >Chol-SS=Chol-tetranucleotide.

[0496] The exoASO 5′-Chol-valine-citrullie-PAB (p-aminobenzyol) was compared to 5′-Chol-valine-citrulline. As seen in FIG. 7, despite both exoASOs including the cathepsin-cleavable linker Val-Cit, the linker Val-Cit-PAB, in which PAB is a self-immolative linker, is more potent that Val-Cit alone. A suggested mechanism of the dual cleavable linker is illustrated below.

[chemical structure]

[0497] In a comparison of (5′-Chol-SS, 3′-Chol-Arg3 vs 3′-Chol-Arg3) and (5′-Chol-SS, 3′-Chol-Arg6 vs 3′-Chol-Arg6), it was observed that the addition of a disulfido (SS) bond or the combination of SS and a cell penentrating peptide (CPP) greatly improved potency. The exoASO potency increased in view of two unique mechanisms of CPP: enhanced uptake into the target cell and the endosomal escape capability. The endosomal escape brought by CPP is important for an exoASO to realize its full potency potential, because most of nanoparticle drug delivery systems suffer from the entrapment in the endo/lysosome.

[0498] In the exoASO 5′-16:0 PDP PE and 5′-16:0 Cyanur PE, the phospholipids (PE) with PDP or cyanur were used as the anchoring moiety rather than cholesterol. 16:0 PDP PE is a phospholipid with both phosphodiester and disulfido bonds. 16:0 Cyanur PE only contains a phosphodiester bond. As seen in FIG. 7, the exoASO with PDP PE had much higher potency that cyanur PE, suggesting that a disulfido bond is important in a phospholipid in improving the potency of exoASO.

[chemical structure]

[0499] The IC₅₀ values normalized to loading density of the ASO per exosome are shown in FIG. 8. The overall efficacy of exoASO was determined by two factors: individual linker potency and loading density. The efficacy is a multiplication of both. Higher exoASO efficacy implies that a smaller dosage is needed to treat a subject with a particular disease or disorder in need of treatment. Lowering the effective dose can significantly reduce the doses need during manufacturing, thus lowering the overall costs of production and treatment.

### Example 3

[0500] Following the procedure set forth in Example 2, the loading and characterization of exemplary exoASOs comprising various cleavable linkers are set forth in the table of FIG. 9.

[0501] FIGS. 10 and 11 show the percent gene expression (hSTAT6) normalized to ASO concentration (nM) of various exoASOs for ASO numbers 1 to 11, as set forth in FIG. 9.

[0502] FIGS. 12 and 13 are graphs of IC₅₀ comparison normalized to ASO concentration (nM) for ASO numbers 1 to 11, as set forth in FIG. 9. FIG. 12 corresponds to the concentrations shown in FIG. 10, whereas FIG. 13 corresponds to the concentrations shown in FIG. 11.

[0503] For Chol-TEG-HEG (ASOs #1-4), there was no significant difference in potency by changing the locations of the phosphodiester (PO) or phosphorothioate (PS) linkage.

[0504] For Chol-tetranucleotide linkages (ASOs #5-6), there was no significant difference in potency when the cleavable linker was attached on the 5′ or 3′ end of the ASO.

[0505] For Chol-(PO) SS (PO)(ASOs #9 and #11), 3′ modification provided better potency than 5′ modification.

[0506] For Chol-SS (ASOs #7-10), an exoASO using one or two PO linkages exhibited better potency than the one with non-cleavable PS linkages (ASO #7). This suggests that, even a PO linkage is not as efficient as other cleavable linkers, a cleavable phosphodiester (PO) linkage is still slightly better than non-cleavable linker, such as phosphorothioate (PS). Based on these potency data and not wishing to be bound by any theory, it is believed that the release of ASO from the lipid anchor or exosome is important for ASO to be transported to its target and exert potency/function. On the other hand, if the ASO is tightly linked or trapped with its exosome carrier or endosome, then the ASO will not reach its full potency.

### Example 4

[0507] Based on the overall potency outcome obtained from both the H1299 and macrophage assays, exemplary linker selections were studied in an in vivo assay. ExoASOs consisting of one or two cleavable mechanisms, or with the combination of CPP, were evaluated in vivo. The STAT6 knockdown (KD) percentage was measured in a single dose 7-day treatment study. The dosage was calculated based on the loaded lipid-linker-ASO (-CPP) weight. Each exoASO was dosed at 5 μg ASO, except Chol-TEG-HEG was dosed at both 5 μg and 10 μg. After seven days, the mice were sacrificed, and the liver tissue was harvested to measure the STAT6 gene knockdown percentage. Each specific linker structure was measured with five mice and the resulting STAT6 KD percentage was taken as an average of the five.

[0508] FIG. 14 shows the STAT6 knockdown percentage as an average of five measurements was labeled on the graph. A higher KD percentage is an indicator of higher potency or efficacy of the exoASO. ExoASOs with reducible linkers, e.g., 5′-Chol-SS and 5′-16:0 PDP PE, showed increased STAT6 KD compared to the Chol-TEG-HEG control at a 5 μg dose level. Among these exoASOs, the combination of disulfide and CPP showed the highest potency, roughly equal to 2× improvement compared to Chol-TEG-HEG. These data suggest that the incorporation of CPP likely improved the cellular uptake of exoASO and facilitated endosomal escape, which resulted in potency enhancement.

[0509] It is to be appreciated that the Detailed Description section, and not the Summary and Abstract sections, is intended to be used to interpret the claims. The Summary and Abstract sections may set forth one or more but not all exemplary aspects of the present disclosure as contemplated by the inventor(s), and thus, are not intended to limit the present disclosure and the appended claims in any way.

[0510] The present disclosure has been described above with the aid of functional building blocks illustrating the implementation of specified functions and relationships thereof. The boundaries of these functional building blocks have been arbitrarily defined herein for the convenience of the description. Alternate boundaries can be defined so long as the specified functions and relationships thereof are appropriately performed.

[0511] The foregoing description of the specific aspects will so fully reveal the general nature of the disclosure that others can, by applying knowledge within the skill of the art, readily modify and/or adapt for various applications such specific aspects, without undue experimentation, without departing from the general concept of the present disclosure. Therefore, such adaptations and modifications are intended to be within the meaning and range of equivalents of the disclosed aspects, based on the teaching and guidance presented herein. It is to be understood that the phraseology or terminology herein is for the purpose of description and not of limitation, such that the terminology or phraseology of the present specification is to be interpreted by the skilled artisan in light of the teachings and guidance.

[0512] The breadth and scope of the present disclosure should not be limited by any of the above-described exemplary aspects, but should be defined only in accordance with the following claims and their equivalents.

[0513] The contents of all cited references (including literature references, patents, patent applications, and websites) that can be cited throughout this application are hereby expressly incorporated by reference in their entirety for any purpose, as are the references cited therein.

The application's sequence listing, which the Patent Office published only in electronic form, follows.

SEQUENCE LISTING (1124 sequences)

SEQ ID NO: 1 - DNA, 32739 bp, synthetic construct
  misc_feature 1..32739: note = Synthetic
  source 1..32739: mol_type = other DNA
ttttttaaaattaagaaaaggaatcaatttaattaaataccaaaaagttttacatattcctgaattttcaaccagctacaaaaagcatggatttttcttattagaaaacaaaactgttacaaaaaatttaaataaataaatagctgccataaaatttcaacataatatatagtcaactagttctgtgttatggtcagttaatagaaagatagcgggaatgatgatatgagcaaaagtaaacagaacaaagaagaaaaaagataggaaaaagaaagttagacagagaagagaaaaataaagaaagtgctttattgaatgagctaattacatgaggtcaccaagaggaacatcctctaactgaggcgctgtgatgacaacaacacccgatgctgtcattgtcctggtgtcttcctcaccctggcgtaaaggagatgcccaagctctgcacaggaaggcatcgtcggcaagctctcttctccgacactccaccggaaggatcacagagctgtggtcttggcctggatggatcgcagctctctccacctgagggcccccagctggagggaccggagaacactggcgtctggcagccccgtttccactcctaccaagaaggctcaaagacgacggtcagctcaggcttttcttcttgaagtgtttctaacgcactttttgtctcataattgaaatacatttcagacaacctgtaaaagcaaatagaaagcctgggttgcactcttcagataactctgtcagagtcgttaaccttaaaagtctcatctcttcatttccctaaactccacacacttctaaaatgtaaaaaaaaaaaaaaaaaaaaaagagggaccacaactcccagagtgctccgcgtcctcgccgccgtcgccgccgccgagaccaagatggccgcgagactccgcaccttcttcaagaatgcctgggccaaggagccggtgctcgtcgtgtccttcgtcactgggagcctcagacccccaggaccccagcctggagtggctgaagaaactgtgagcacctccaatgacagaggaggcccctcccacggctcccaataaaaatgtggggaaaaaaaaaaaaaagctctaagtgcccaatgtggttcctgttatatttttaactatctagttgggaaaatgttaagcatacataaaagtatagaaaatagtataatgaaccccctgtgtccattacccaagttcgacaattaaacaggtcatgtcaacttgtttcttctattgcccacccactcctcccacccatggattattttaaatactgcatttaatgcatctatcaataattcactttgtgacactaaaatataattacaatgtcactatcacaccaaaatcgtttaacaataatttcttagtatcactgtatgtccagtcagcatttacgcttcctcaactgtcttgtaaatttttttaccttatgttcatttagtcactaacctgatcaattctacacattgcatttgcccaggatgcctctcacatcttcgatgtaagttcttcctcctctttaataaagtttcccttgcaacttaactaataaatccacccatttgtcctgcaccatttataaccatctcaatttggtggtgttatatactgaatgtttgtcttccttaacaattcccatgatgaagcccgaacccctaatgtacggtacttaaaggtgaggcccttgggaagtagttagagttagatgaagttgtgagggtggggccctcagtatggggtgagtgcccttacaggagagatatcagagagtttgttctttctcccctgtcttctctcccttgcctcccctccctccatgcaatcacataacaagaaggtagccatctgcaaatcaggaagaggactctcgccagcaaccaaattcatcagagacttgattttggactttctagcctccagtattgtgagataataaatctgtgtttgagtcacacagtctaaagcagcttgttatcgcagcctgagaaaacgggttgattgcattcatggattcttcaatctattttgagcctgtccctcagcctgggtccagaatgtccctcagggctaggtcagtgatgctacatgtagcagtgtccccagctttgacctgaccaatcctttgtttgttcccccatctctcttagctctgggaatattggcttgtcctgcagcaaatgtgctccattatgttggcacaaggatgcaaggctgattcaaacttgtatttattcaaacctgcattccaacaagttctcagccttgagatcattaatatggacagaagtccctggactaatggaatttatattttgggagcagagatagataataaataaacaagaaaatgacatagcacataagatgtgctacactgcagaggagaatgagaagagaagaaaaagtgcttctattttcagtagaatagtcaaagacagcctcgcagagaagacctttaagcagagaatttaggaaggtacagggaataatgcaggtggatactgaaggggagagagttctaggccagaagaaaagcaagtgcaaaaatccagagatgacagtgttcttgcaaaacagcaaggagatcactgtactggggcagaataagcaagggttgggagaagcggaatcttcggaagcaggagaggctggattatgtggggcatggaagccaccatgagtttgttgctctgattatgaaagtgataagaagacgatgttgacaagagtgatatgatgcgagttacgttttagctgaatcccttgtctgctaaaatcagaataacagatgcagggtgacctgtcagaatgccaccatgacaatccagacaccaggtgatggtggcttgagccaaggaagaagccgtgaagctggcctgaagtggtcagggagtggccaagctgggaaggcagagctcacaggatgtgctgacacattggacatgattataaggaaaaagagacagtgacgacagaaccagaaatgttttggcccgagcaacttggaggaagtgaccatcgactgaaatggggaagaatcaggtttcgggtagaagagagtagcaagggtgtggatctagatgtgacgtttgagaggtttattaaaccttcaagaagaaagatcagccaagcacggagacacagaatttatggacatataatctggaggccacagcacacatatcatgaagccagaagaccagataatttaaatgagggagaaagtgtagggaagaaaaattagcccagcgactaagctctgaggattcaacacataagggtcaggatgatgaagaagaggccagaaaggagactgagtagaaggatctgatgaaataggagaaaacccaggagagcatgttggccttaaagccaagcagtgaaaacgtcttcagggaaaagtgcaatcatcacggctgacagaaccgtgggactcgccaggaagctcttgctagagaggagacgactacctcagtagtatcacagaggtgggctggcaatatcctgacacactgtcgaatttcgtgtaatttcccatcttgctattcctggagcactcttttcccatttagaaatcctcagaaaccgccaggcacggaggctcacacctgtaatcccagcacttggggaggccgaggcaggcagatcacgaggtcaggagatggagaccatcctggctaacacagtgaaaccccaactctactaaaaatacaaaaaattagccgggtgtggtggcaggcgcctgtggtcccagctacttgggaggccgaggcaggagaatggcgtgaacccgggaggcggagcttgcagtgagccgagatcatgccactgcactccagcctgggcgacagagcaagactctgtctcaaggaaaaaaaaaataaatcctcagaaacaaaacaacaagatccccactatgtaaagacccttccaatttggatgacccatagacgagttctacgaagttcggttccttgtgtagaacagaatcctccttggccatgatcgcatgagggcttgtgtttctttggggaatgtgggtgaaatccagcttagccttggtgattctaaccatctcagtgaagtggaatgtgtagtttaaccccatattctctattttaaaatatccaccacaactgacccaggcccaacctaatcttgagtggctgcaaatgaagcgagagccatcctggattttgataacagtcaacgtttcctgagaactcagagtcccaccacgggcatctctgcagagcacactcaccccaggttctgcaggaggcagctctgctgtttcagcacttcacagaacatcatgacccccaggtcgcccaggtcattgttgcccaggctcagctttcgcaggctctggctggaggtcagaagtgtggaaagatcccagcagcagtgtgacgtgaggttgcagttgtctaatctgcaaaaagggggtgatttaaagaaaatgtccccttaaccatccccctagctccccaagattttagcatcttagcctgtcttgtttcaggtggaaaaaaaaaaagcacaggagcacaggactaactagcttcaagcagccttgtatgctggtaattattcttctctctctttttcaaatccactgcattgcacagatcaaattagtaacagtggtttgttcattgatttaccaaattctgtgcctttccctacatttccataaaatgtaagtgtcatactgccctccttgttttgtggtacagaaaactgtgatggtaaggactcaagttcctacatctatatcatctggaaggactcctcccagtcccatgatcctgtaacaaggcaaacactaagaagacacctcacttctaagatacagattatcttgtggccactctgcctaaacgtccctccacccttggccaccatgtgttctcattgctgtaataaaccaaaggacttactccaacacctgaagcttgcagtcggggtgcaagagtccctcacagagtagtttgatccccttgtctccgagagtgttgcctcgcaggtaaaggtgcgtgagattctgattagtgctgagtaccgaggacaaagctgaacaacagactgacgtaaggccagaattcaccaacctgtagaaggacagggagaagagtcctcagtacccagctgttccccaacattgtgcagctgctttgactcagtgcctcgtcctctctcagcagctgcagccttcagctcagagagcaggagccagcatctcagatatgatctggggagagcaagacctgctgtctctggctgtcacaggagacacaaatgatgtctcagcagatgctttgctgtatgagtccgacagaaagagccaaggcaaactgagccagttaccccatactcctcctcctcctcacacagctttcctccggccaggagtgctcctcagcaccacttcttccagaaacacatcccagtggttatcctcaactaataatccccgtaacactgcagacacccacactgcaggggcctttttttttttttttaagagagacaggaaaaaaaaatcctcctcatgggaagtcggtgctgatttaaacatcaaagacaacaggtgaacgtccattgtgaccttctaagctgtagctagggctgtgacaggaacacggcggggcccttagcaattgccacctcccgccttcctgcgcccccaaatgcccctttcacatctttctcgctgcagccctcaaccacgttggagaggtgggaggatcgcttgagtccaggaagtcgaggctgcagtgagccatgattgcgctgccacactctagcctgggtgacagagtgagaccctgcctaaataaataaataaataaggccaggtgcagtggcttatgcctgtaatcccagcactttgggaggtccagcactttgggagggtggatcacgaggtcaggagttcaaaaccagcctggccaacatggtgaaagcccatctctactaaaaatataaaaattagttagggtggtggtgggcacctgtaatcccagctacttgggaggctgaggcaggagaattgcttgaacctgggaggcagaggttgcagtgagccgagattgccactgcacttcaacctgggcaacaaagtgagactctgtctcaaaaataaataaataaatagaaaaagccaggctcttgctcagtcacccaggccaagtgcacagctcactgcagtcttaaactcctgggctcagacaatccacccaccttggcctcccaaagtgctgggattacaggcatgagccactgtgcctgacccagagaccagtcttatttgattattatatcaacctggcaaggaaggagtgcagctaaaactattacatacattttacatattagaaatctaaggcttataaaaattacatgtttctctcaaggccacagagcaggtgtgtggtggggagggatccagacctggactttccaccttttagtctcatcttctccccactgccctttctgtccacctctctcttccttctgcacagcaaaaggccttttagagcataaaaccccaaaaatgcatcaatctcgatggaattaagagttttgatgtactattcttgagtcaaattaagcccattctatcacccaggaagagcataagagctctaaaatcactggtggcgtaattcctaggagcacagatgcttctattccatgaagccaggaatagcgcaggtgattgcctccttcctgccagagtccttggcaatggcatgttttttaagctctttggtgtctacgaggcaggaaaaatagaaatacagaaaaagtgtattcagacagtaaagcatgaacagatgaccagcaggaaaaagtgattatccatccactggtttctatcttcccaattaaggaagagtcaaactgaaaagacacagtaagtaagactaataggcaaatgaagcccaagagagacagacaaaaacaaagcaagttttgagtggcttctactaagctctcatccccggtaagaattctatcagagggttgttgttaattaacatgcagaagggattagtagcattcctggcaaaggccagggacattctagtagaatggggatggtcttcaaagaggaaaagagaaaatattttttaaattatgtaattaaagttatgcaggctttaccactatttccaaaaaggagtagaatggattattcaacagatgtttggggagcactacacagtagtagtagaaattgcaacagacggtgcagttttgttaagaaaacgtcatatccaaattgtgaaaatgctggtaactattaagcaacggttacactgaacacataataaaatgtttaaagaatcaaacaaccatgtcccaccaaccaatccttggattagaggaatgtgattgacatctcgatttcaaccaatccacctaactgagctctacatttaccaagcacggatatcttgccatgtactgtattaagttaattggttggggatttttatttattaactacctgcctatgtcacaaaactgtctcataatgaaaactgaatcccagtgctttgggaggccaaggtgggaggaccacttgaggccaggagtttgagaccagcctgggcaacatagcaagaccctgtctctacataaaaaattttaaacattttaaacattacccaggcatggtagtacacacctgtagtcctagctagtcagaaggctgaggcaggaagattgcttgagcccaggagagttcaaggctacagtgagctatgatcctaccactgcactccagtctgagccacagagcaaaaccctgtcttaaaaaaagaaaagaaaagaaaggaaaataaggaaaggaaaggggaaagggaaaggggggggggaggggaagggaagggagaaagagaaagaaagaaagagagagagagagaaagaaagaaagaaagagaaaaagaaaaagagagaaagaaaggaggaggaggaagaaggaaggaaggaaggaaggaatctgaagaagaagatcaaacattttttgagtatttattgtgtgcttgacatggatgacgactttaaacagggttatctcattgaatgatcacaacctcaagatgggaatgttagttttatccctgcttttaaatggacaaaatgaggatcacagtaattaaaaaataagtaggagcttcttagatggatagtagaaagtgggaaagtgggggtaaccttccaggcaaaaggaaaagagtagcaagaataaggaagattaaaagaaccaccaagatgtttcaaaactaattcatagctgggcacagtgatgtccacctatagtcccagctacttgggcggctgagacgggaggattgcttgagcccaggagtgcagatgagatcaggcactctgggtggtatggctgtagatgaacccaggaattcaaattcagcctgagcatcatagcaagtccccatctctaaaacagcaaaacaaaactcatccaatatgactcaaaatggagtgcaaggtatggcaggagagagggcagtatcagggacagccttgtgtgccaagctaagatgtcactctgactgcagagaagaacttttgaagatttttgaacaaagggtcaatattttcaaatttgcatcttaaaaagttccctctggtgtagtgatgagtggtagagggaaccgaaagcagagcatttaggaccgtcccccgtttactcactcagcagcctcctggaaagccccactattcaatgaggcaggaggaagagggcaggagcaggtcagagaacgggggtggaaggtggggtatgataattaaaccaatgttgcaaatgctcagcatgtgtgacccttgagcagtattgagacaggcagtacacaatatgcagccagagatgaggacccaaagttcgagagaaaaaaatgtagctatacctaacacataggctatacctaacacataggctatacctaacacgtaggctatacctaacccataggctatacctaacacacaggctatgcctaacccataggctatacctaacacacagccacatgtatggctgtacctaacacataaaatgcataaaagtctcgactgattaatgccacttatagatacctatctcaaagcaaatacacatgcataaaactatatatacaaatgtgctttttgcagagttgtttgtaatagtggaaaagaacagttatcccaaaatgcatgatttgattaaataaattatggtaaagcacactatgggatattatgccccaatcgatagatctacacaaatcagcatggaaatttatccatgataaatgaaaaaaggatatcacagaaaaatatttatattatggttctagtttcaatagatagggtgttatggattgaattgtttcctctaagactttatatgtggaagtcctaggccccagtacttcagattgtgaccttatttggtgatacggttactgaaaatgtaattagttaagatcaggtcgttacaaatctaacatgacttgtgttctttcacagggaaacttgggacatggagaaagacacacacagacacagggaagacaccacgtagagataaaggcaatggtgtggcagaggcatctacaggtcaaggaatggcaaaatgtgtcagcaagatgacattccaccagaagccaaagagaagcatgaacagattccccacagccctcagaaggacccagcctgctagcatcttaatctcacacttctggcctccagaactgagggacaataaatttctgttgtttaagctgctctgtttgtgatactttattacagtagctctaacagactaggcatttaaaatactacataacaatgtattacaaatgcaacatgaaaatcacataggtcttcattcacattactgatataaataccacccagatcagcatatacaggaaatccatttgtccataattagcaaccaatatatgttcacaaagctctgatactcccttggatggattgatggatggatggatggatggatggatggatggatggatggattgacggatggaaaatagagggatggatgatggatggatggatggatggacagatgaatggattatataacaatctattgtattaaaaaaagtctggatggttgttcatcagactattgtaaatggctctctcagaagagggctgagaaggagctttcactttccactttgtctgtactatgatatgtttacaccaagcatgtgttacttttctaataaaaagtttgtgaatgatatctgggtttgagacctactgttgttgaaattgagaggtatatgagaattctcagggagtttagaaatatttagtaacaacaacaacaaaaaaggtaaaccaggcgggtgtgtggctcacgcctgtaatcccaacactttgggaggccaaggcaggcagatcacctgaggtcagaaattcgagaccagcctggcaaacatggtgaaaccccgtatctactaaaaatacaaaaattagccaggcatggcagtgcacacctgtagtccctgctactcagaaggctgaggcagaagaattgttggaacccgggaggcagaggttgcagtgagccaagattgcgccactgcattttagcctgggtgacagagtaagactccaactcaaaaaaaaaaaaaaaaaaaaaaacacaactaaaccagtcgtgaaatccccagaccacaggaagagaagccaatgcaggatccagggagggggaagctataacattagcaggaaagactaagtagtgacctaaaaataagagcgaagaaggcttccaaagaggaagagtgaaatgaattaaaggcagcagatgtcaactaaagtaaggactgggaaggacctgtacgacctataaggacccagcctgctgatgcctcagtctcagactttggcctcctgaactgagaggcaataaactcttgttgtttaggccgctctgtttgtgatactttattacagcagctctaccaggttaggtattgacaatagtaactacatagagcatattacagatgcatcaggcacatttgtaattggcttgtttgtcatgtggaatttggaaccaggatcactgagagtcacctgagtgcctacgcctgggcctcttcggttccatctgctttgcctggagggctcttccggctccttcacagcccatcccacgcttcactgagcacctgctccaatgtcacccgctcggagaggcactcgccaaacgtgagcagagaagcacccctcgccgtcactccagtttttcttatagctcttatacacagggtatattgtttagcatgtctattatctgttatcacttccctaaaagaacggttgtgaaaacaggattttggtctgttttactcactgctgctgtcagtgcccaccacagagcccccagagggcctgcaaaatgaagggacaaaatcatgtctgttgaacaaacttagagaagcagaagtcaaattgccaaggaagagtaatattctaaggcgatttgctaaggaagggtaataccctaaggcgaggaaatgaaggcactgcaggaagacttcatagaaagagatatggtcacatctgaggattggctgatgggagaggtccaaggaagtatcagagctttgtgaacagaggttggttgttaattatggattagtggattactcctctgggaagacctttcctgccaaattttgtcttgaatgctgatctggctggtatatatattaataatgtgaatgaatgaagacctatccaatttgcttattgtatttgtagatattattgtcagaatgaagattcaaaactgcctagtcaatgggtcaaaagacaggtaagatgaggtttagcaaagctaaattggaggtcccacccttaagctgagagccagatgaagaagccctgtagagagcccattagcaacatctcctaaggcaatgcactgggaattaaggcagtggcttgggaggtcacagacgtttgtctacactgagttccactaccttctctctgagtgtccttggacaaagttatgaggctccctgaattttattttctcctctttaaattggagacacagataccctaccctatagcatctttctgaagccaactgagaaaatccatgtaagaacatgaaagagcaggtgatacagggaaagtgatacaggaaagtggtacagggaaagtgcatgattattagtgggtattccctactactgtttactgcagaattccaacatgaatcaaaaggcttatgtaactgccaaaaaaaacaaggaaatcagagattccaccagtgaaaccatagttctctgcaacaggaggtaaaacatccaccatgcatcatcaggtctgggcaccacatttcaaagacagacactaacaaaccagcctgtgtacctgggagagcatggctacataggtgaaggtgctgagccatgacactgttgaggatatagaggctgcagtgtaagagtcctctcctagtgtagaggctgcagggtgagagctctttcctagtgtagaggctgcatgcactatgcgataacttgcatgcttgcaagcatgcacacataaaatgggtgactattcatgtgagtgtcttggaagcaagtttttccctcaacaggcaattgggctgcaccatctctaaggtttcttccaacactaagaaactctagttctataatcataaattagcataaattatcttattagcagcagtatacattatatgcctccagtccttcaaagcatttctgatgtttttacctccttactctaccttcagctctgcctgaccaaagtaacccccatccacattttccaaataattcacctctgaaaagaagttacttttctggtaagacacccatgaagacttaccccagtttctgcaggttacactgtggattcttggctttttcacataaaattgcgactcctgagtctcccaaggcattctcccccacatagagtctggtcagggaatggctggtgctcaatactgatgcaagatcctgacaacatgctgatgtgaggcagcagctgaccaaccttccatagagatggcagaatgtcagtcatgtctctcacccacgctccaccatggacaaggaagcacccgtacctgccactgcctctactccagtttacacatggaaagggagtggacacaagctctatgtacacttctgatttccttttccatttggtggaataacaagtaagcattctccaagctcccaccaatactacatcttcccagctccctacattcagctttattgtggtaaaatacgtgtaaaataaaatttaccattttaaccatttttaagtgcacaattaatggccttaagcacttcacattgttgtgcaaccatcaccaccaccatctccagaactcctttcatcttgcagaactgaaactccataaccattaaacaatgtcttcccactctccgccctcccattgcctgcaaccacgtttcttcctgtctctatgaatctgtctgttctagacacctcctataaggacaatcagagtatttgccctttcgagtctagcttatcttacttagcataatgtccccgaggctcatccatgttgtagtgtgtactagaattctttttaaagctgaatgtacatatatagcacttttcaacacccttcatccgttgaaggacgtttggttatttccaccttttggctatttctaatagtgttgctatggacatagatgtacaaataacatgtttgagttcctgccttctgttttttttaatgcttcctctgtcacccaggcgggagtacagtgacgggatcttgactcactgcaacccccgcctcccaggttcaaaagattctcttgcctccaccccgagtaactgggattacaggcatgcaccaccatgcctggctaatttttgtatttttagtagagacaaggttttactatgatggccaggctagtctcgaactcccgacctccagtgatccacctgcctcagcctcccaaaatgctgggattacaggtgtgagccaccgctcctggctgagttcctgctttgaactcttttgcagatatacccagcagtggaaatgctggctccagtagtaattctgtatttattttttaggaattgctgtgctgttttccatagtggctgcatcatttacattcccaccagcaacacacaatggcttccatttctccgcacccacaccaatacttgttgttttctagttttcttgcttttgtttgataatagccatcctaatgggtgagaaatggcccttccatttttaagtggttttttctctccttcaaaatgcaagtctcccagaagcactcagggaagggctgcatacaacatcgagggtctgcattgctttagcaccatttttcttatacaatatgaggacccagggcttgtcatgaagttctaaaactcctctaaagcaatgcattacactgattttttctttttgtcagctaggcagtaggcaccctaaaggcagacatcttctttttgttattatttatgctccttgtcagggttgagtgtgtggctttccccacgacaaacactcactgaccgcaatgctagacaccccaagacaagcacacgcagtcacccgagccgccaaggccattctcactcaaaccccagcccaccgggcctcactgaagccagagtgcgcagcacgcctcgctggcagaacttccttaggggaacgggctcgactcaccagagcttcttcagattgcacaacaggtgcttcagtcccacacacagaagtctgattccgaagtcaccgagggcgttgtcactcaggtccagctccaccagcttctggttgctgctgaggaccaaggagatgtcgaagcagcactcatgcgagaggccacagcgccccaaccttcatgccaagaacagaggcagaaagcatcagaacacacctgaccagagagctccagaacagaggaagcatcaggacacacctgatcaggaagctccggaatagagaaagcatcagaacacatctgatcagagagctccggaatacagaaagcatcagaacacacctgaccagagagctccggaatagagaaagcatcagaacacatctgaccagagagctccagaatagagaaagcatcaggacacacctgacaagagagctctggaatagagaaagcatcaggacacacctgaccagagagctctggaatagagaatgcatcaggacacacctgaccagagagctccggaatagagaaagcatcaggacacacctgaccagagagctccggaatagagaaagcatcaggacacacctgaccagagagctctggaatagagaaagcatcaggacacacctgaccagagagctctggaatagagaaagcatcagaatacacctgaccagagagctccggaatacagcacaaggcacattgggaggtcagcccccagtctccccagtcacagcagagggatcacctgtcagtgaactcccggccgtaaacagtgccgggtgcattgagatcaccccccagacatgtgaatggtgcgctcctggtttgtaagtgaagcgggcggtgtgggcctgtgcacccacctccttccctcgtgttcctaaccattgacgtgcccgcagtcggcactgccctcgccagtgctgcactcagctatttcttgtcttcaccaacattgtcaccccattgtgtttgacgatttcatcccagccctccatctatattgaaaggaaaagcagctctgattctttttcttttcttttcttttctttttttaaagacagggtctcactttgttgcacaggctggagtgcactggcgagatcatagctcactgccacctcgaactcctgggctcaagggatccacctgcctcagcctcccaagtggctgcaaatacaggcatgtgctaccatgcttagccattttattttatttatattttatttttattattattattatcttctaaagacaaggtctcaccagcttgctcaggctggttttgaactcctgggctcaggtgatctgcccacctcagcctctcaaagtgctgggattccacatcccgctgcagctctgattcttgattagtttccccgtcacacacatgcacacaaacacacacgcacatcactaccaccgtcaccaccaccaccagcaacaaaaactatactttatccctgtcatgggggcaagaacaacattctagcttctttccagggcaatagttcataggtcctggagcctgttagaccaccttcctttctgtccctatccttacaccaacttcaagcaaatggacaaatggatctctacttctctgcgaagcatctcactgtcccctacccttccctgtttgtgtctgcctctccagaatcatacaggggcaatggcagtggggagagaatttgggcatgaagttggagaaataaggttaaatgtcccaaacaaccagtctccatggcactacgatttgaaatttaccaaaagagcaaagatgaagagtgtgatctatatacataatggaatactgctcagccatagaaaagaatgaagtcacatctttgaagccacacagatggaactggaggccattaccttaagtgaaacaactcagaaacagagtcaaataccacacgttctcacttacaagtgggagctaaacaaagggtaacatccatagagcatggaatgatagacactagagcctcagaagggtgggagggtgggagccaggtgagggctggaaaattatttattgggtacaatgttcactatttgggtaagagttacactaaggccgggcacggtggctcacgcctgtaatcccagcactttgggaggccgaggcgggtggatcacgaggtcaggagtttgagaccagcctagccaatacggtgaaaccttgtccctactaaaaatacaaaaatcagctgggcgtggtggcccatgcctgtaatcccaactactcgaagaattgcttgaacccaggaggtggatgttgcagtgagccgagatcactccactgtactccagcctgggcaacacggcgagagtccatctcaaaaaaaaaggggtagttacagtaaaagcccagacactaccactgtgcagtaacatatccatgaaacaaagctgctcttgcgccccctacatctacaaaaataaatacataaagtaaaaaataaagagcagagcagacagaaagcatttaagccaccgaacagcacaatcgaatcagaattttctaaaggaccatcttacttttgtgcagagaatggtcgggtgagggaaaaaggcagacacagggagaccaaagagccaacattcattcagtgcgtgcttttgaccactgatgggtactaagatgtctgtccaggcgtggcaaagatgacagcaagacaaacaaacgcaaaccccatccccggggagctgatggtctaggaggtcactgcgtgtccaggcaagtggtgacagttgctggacctgggctggtggggtgaggacgaggaaaagtggaaaacagctcgggtaggaggaaaaattgataagactggtgacaaggtgagtgtgttgagccggagagggaggtagcaaaatgtcctagagtggcggactttaacacttgctgtgcagctcctcaaaaatgcagacgcctgcatgcgtccacagagcagggaatgaaacagagctagtgaggcggcccaggcaccagcgcggtggggcgtgtgaatctgattcatggtgtgggagaaagcaagcacattttttattattattattattattattattttgaaatggaatctcgctctgtcacccaggctggagtgcaatggcacgatctcggctcactgccatctccgcctcccgggtacacacagttctcctgcctcagcctcccgagtagctgggactacaggtgtgagcaagcacattattaataaagtcacaggagattccctgtgacatttcaacccatacaaagcattctgaccaggctgggcaacgtgatgagaccacatctctacaaaaaaaatacaaaaattagccagcatggtggtgcatgcctgtagtcccagctactcgggggagctgaggtgggaggattgcttgagcctgggaggtcgaggctgcagtaagctgtgatcacacactccagcctgggtgacagagagaggtcctgtctcaaagaaaaaaaaaaaaagtattttcatagtttttaggtgaggttgccattgttgtaaatggcaaattctccaactctcatctatgaacatggcccatgaggaaatggaatatatcgagcatcatggttgtttcaagaaatgactttttttttagttcctcattcattcttccccacacaaaacttccccagctggcctccaacccattctaccttctcacttgttctgggctgaactgtgcccccccaaaaatttacatgttgaagccctaatcctcaagacctcataatgtggctgttttgggaaatggggtctttaaaggagtgactagattaacattaggtcttgtgtagtcatgcctgactgtgcctaatccatcaggactgctgtccctgtaagaagaggagactaggccactcttccccccaaggcaagatggcatcagtacacagggagaagggggcatctacaaaccaaggagggcggcctcagaagaaaccaaccctgctgacaccttgatcttagactttcggcctcagaactgcaagaaaatgaatttttgttgttgaagccattcagtctgtggcactttgttacagcagaaaccacaccaccggccgggtgcggtggctcatgcctgtaatcccagcattttgggaggccgaggcgggcggatcacctgaggtcaggacttcgagactagcctggacaacatgatgaaaccccatctctactaaaaatacaaaaaattagctgggtatggtggtgggtgcctgtaatcccagctactcaggaggctgaggcaggagaatcacttgaacccaggaggcagagattgcagtgagccgaggtcacggcattgcactccagcctgggcaataagagcaaaactctgcctcaaaaaaagaaaaaaagaaaaagaaaagaaagaaaccacaccagcaacctggtcctgaagatctttctccagtctgtttctctctctctctctcatatgaacttgcactcacacagatcacatgcacggggactcaccacaatctccgaatgttacagccaggatgctggagcgtttcacacaacactctcatccctgggtcccccagagaattgtcactgaggtccaattcagttagactctggctggtgctcagaactgaaaagaggccccggcaaaaactggaagtgaggtggctgttcaccaatctaggaattagaaggaagacagacagaaaagaaatcagcctcgaataataactaactggagctgggggccggggtgcctggcaccagttcagagaaatgccttccggggattaagaaatgggtcacgaaaccaaaaattgttcccagagaaatgaagagggctggatgagccttggtaaaagcagttctgcctcctctcggacggagagcatgagcctgtgactgtggcggactgtggcaccctacagcctgctccccagtgtcctcctctcgcccttaccagtccactgtcccaacatggccctgaacgttctgtgctgggtgatcagagggcagtcctcactcctggctacacaacagcatcaggagtgctcacaaaaatcctcaggccaggctgggcatggtggctcacacctgtaatcccagcactttgggaggccgaggcgggcagatcacctgaggtcaggagttcaagatcagcctggccaacatggtgaaaccctctctctactaaaaatacaaaaattaattgggtgtggtggcacgagcctgtcatcccagctattagggaggctgaggcaggagaatcacttgaacctgggaggtggaagttgcagtgagccaagatcatgccacagcactccagcctgggcaacagagcaagacttcatctcaaaaaaaaaaaaaagaaaaagaaaatcgcaagcccaggccacatccatggaaataaaatcagaagctctgaggtggaactagatgaattttttaaattttttttcagatgaaacccaagctggaatgcagtgccatgatcatagctcactgcagcctcaaactcctgggctcaagcaatcctcttgcctcagcctcccgagtagctgaggttacaggcacgagtcactgtgtccagctatatggatcttttttatttaaaaaaagccaggtggctccaacatgcagtcacatttttgcttttgtttttctgtagagaggtgctctcactttgctgctcaggtaggacttgaattcctggcttcaagcaatccccccatcttggcctcccaaaacctaggattacaggcaagagccactgcacccacacatgcagtcacctttgaatcacctgtagctctcattcaaatgcaaagtctagctctctaggtctaagattgggtccacaatcctgcatttctaatagatgctcaggcttctggttctcagaagggactggaacatacaaagcaagctcctgccctcagagtaaggcagctgccatctagaaagatgggtgctgagccccctaccagggctccagtcagagtctgtcctcagagtaaggcaggtgccatctagagggatgggtgctgagccccctaccagggctcccgtcagagtctgtcctcagagtaaggcaggtgccatctagagggatgggtgctgagccccctaccagggttccagtcagagtctgtcctgaggaaggaaggtgctatctagagaaatgggtgctgagcctcctaccggggcttcagtgagagtctgtcctcagaggaaggaaggtgctatctagagaaatgggtgctgagccccctgccagggctccaatcagagtctgtcctcagaggaaggaaggtgctatctagagaaatggttgctgagcctcctaccggggcttcagtgagagtctgtcctcagagtaaggcaggtgccatctagagggatgggtgctgagccccctgccagggctccaatcagagtctgtcctcagaggaaggaaggtgctatctagagaaatgggtgctgagcctcctaccggggcttcagtgagagtctgtcctcagaggaaggaaggtgctatctagagaaatgggtgctgagccccctgccagggctccaatcagagtctgtcctcagaggaaggaaggtgctatctagagaaatgggtgctgagcctcctaccggggcttcagtgagagtctgtcctcagagtaaggcaggtgccatctagagggatgggtgctgagccccctaccagggctccagtcagaatctgtcctcagaggaaggaaggtgctatctagagaaatgggtgctgagcctcctaccggggcttcagtgagagtgtgcaaaccttcctcacagatgtgtgatcttcataaggtctccctgccctctccaccttccacctcactcttaatgagtagttctgcctacttttctctctgtcttactcttcttctcccatttctatggtctgaatgtttgtgtgccccaaaatccatacgctgaaatcctaaccctcaacatgacgtatcaggcgatggggcctttgaggtgtggttaagttatgagggtggagccctcaggagtgggattgctgtccttaggaaagggaccccagagagctgccttgcctcttcaccatgtaaggacacagtgagaaggcaccatcgaccagggaacaggccctcaccaaacaccagatctgccagagcctggatcatggacttcccagcctccagaaccgtaaggtgaaccttccttttgcttataagccaaccagcctgcagtgttttgttatggcaacctgatgaatgaagacaactgtcttttttccagtcactcggaactgtttgctgccgtagaaaccgtaccctgctttcccacacctgccctctctctcaacaccgtaagcccccagcctggctgcccctttccttctctcactctctcactgcccatcctccggaagctggctgagcggggacacccacccgtgccccgctggtgaacaggttcgtccccttgtgctttggatactctgcaagtttccttgtcagagcccatgaccccctccccgacatctgcacttgtttccggactgtcccacagccagacctcaagtccctgtgaccaggacctgggtcttcaccaccactgcggccctgtgggcagtcagtccttcatggccaaaccatgactaggaaggtggtcctggtcatggtaatgtcaacggatcaagaaagctgaaactcattgttgcctgtggaagggccaagcctcctgtttcccttaattttgccccacgtcaagtgtcttctatccaggctaaactcacacatcacagggtggccaccttcctacaaccactgtgggtggtccttctgcaggaggcactgaacgataaacccaaaagggactcagaagtcaggtgactcaaccacttcattgcacagacttggccactagcttccaaccacccagcaagtgtgtgaacagacccgaaaacggggttttggcaatgcccagtgcagagcaacatgggggcctagaaagagggtctccacatttctgctctatttcccttgatttaccttcatcatgtttttttccaaggaaactgtgtctctctccactgtcacctgcacacactttttctcagactgcattcatgatttggctcataccagtcttcagtgcagaattcctttaatttcttctctatgcgcccaggtcccaccattccttaaaggaggcttagattgcacatttctaagaaacatccccccagcctccagctctgaggccctctgtcccctcgctcctgggacacagactctctggcattgttctgccccacagacattgactgactcttaggcactagtgctccaagtagcttacaagaaatttcagttgacaaatatttgtaggcaatcctacatcctacttaataccttgtgctaaactggcattccccaaacatttgttccttgttttattttttttttcctcatcccatttatccacctaccatacatcaatctttgctcatgaaggagtctcaaacagacagtggtggcattatgatgtagctgtggcaacagtatttggaagatagttgaaaagagatgagaggaggcaagcgccaagaagaagctggcgaggaagcaggaggaagcacctggaagccgagtttccttacccatgagaacaggcagcatgagaggagcttgggaggacacactgcaccatatcaaggtgtcggccttccttttcctcctcctcttcctccttgggcatgttatggagaaaccccagggacagtgactccacccgatgacagttctcaatgcaaaaggaagaaaccatgtggtccattctggtggagagattgatctcaatcttggggaaatagtccatggccctttgcacgaagtcctcctcctgcatctcgtacaaacagtagaacaattccagctggctgggctggatctgcagctttttagctttggctttcacttcaatccatttcagcagctccagcctgatttgctgagagatcttgcaacttaatttcttctccaagtaggaggtcctctcctggtttaccaggccaaagaggaaacgtacaacaaaaatcaaataccccttttcgaatttgccatagttttccagaaggactgtcacgtctcggctgggaagcttcaaacgactccctggaacgttcgtccttccttccttttcctcttccagcaggtagtacatggcggcaaagaactcctggaaagtcatgtggatgaagctgtagaacttctcgcagtccacttccttttggaacaggttcatcctcaggaaagcagacacatccgccttctgcagtccatgattcctgaggtcggactcctcaaacaggattttctggttccagattccatctgcagccaaagagcagagcccccagaggtgggcgcagaggccgtgctcctggctccctccccggggctgcagcaaactggaaaggaagaagacgtacaccgcggtggtggtcttggatgtctgggcaaggctcttgccactctccatctgctgtttcagtccagtgcacacgatccagcagaccagggggatgaagcacatggtgaagaggacctcgttctcctgaatcagactgaaggctgccctggcttgggcctcatcagagaagtacttgaagaagtactctttccttttggcctcggagaaacccaggatctccacatgccgaggatggtccagcaagtgctgcagtttctccagggccacaggtctcgtggtgatgagcagagaggcctcgggaagcagcttctttctgatgaggctgctcaggagaatgtctccccgctcggccttctgccagtcagtgcagagcggtcctatgtgctcgtcaaaggcaccttgcagctcatcgaagccgtccatgaggaagaggattctggagggttttctcacgatcttgtggatgggtgggtttgggtcggggcagcagctcatgatcaggtcccccaggctcctctgtgtcacaaggctcacctctcgacagtggatatagaacagatagtcaaacctgtcttggtagagtgtccccgacgcccagtccaacatcatcttcctggccaggattgttttcccaatccctgccgccccctggaacaccacggtgtgcacaggctcagaatgctcatcatcggggtcaaacagcaactccatcttaatgggactcacggggctctcacacgtcttggtcttgccgatggccagaagctcctgctccctctcctgctggctccggtgctccttgatgagacgcagtcgtgtgtagcgtttgttgaggctcacactctcacccagacgggcattcctgtcttcaatgcactggaatctgcttctcacgtactttctgtacttcttacggtaatctacggcaaagacaggaagttagggggaaagtatacacacatccacctgagatgcgctctcagctggggcctgtcatcggaagcgagtggtaaccggaatggagaaatggaaggtgcagctcctccccactgggtaggaaaggtgccgagaatctctggtgtcaagtttttaagatacacagctgagcagaaggcccatctctatgtgtagctaccagcccaaagatcatttgaatcaatcttattcctttaagtaatctgcatcctatgccttatcaaacttgaaacgcttaatcaccgccgctggctctgggactgcaagagccacacaaacatgaatttgtttcttcaactgacaatggatttcctgagacaggcctttgcattccaaagagcaggaacctatagtatggccaagttacccagctgctcagcttcccagagcctcctgaaccaggtcttaaaactcaactagaagcaccaccccagtcgcttacctttcttcattttacaaatagagattctcgaaaggtactccagtaaacccatccactcctcttcaatgctgtcttcctggcatatcacagtgggattcgaaacacgtgcattatctgaacctaaaagggaaaaaaaaggtgtcaaaacccagaactattatcacagaggatgcaattgaaacctggcctaatatttggcatgagagaggagaccccaaacatcccccaaatcaaaacatggctctgagttgcagaggacaggtatccagtcaaaagtctggttgggagcatttctgcactcctagtttcaaaacaacttctgctgtccacctgccaagcatgtgttcccactgtccccagtctcagaatctcttcctcaggcctggaaatcaatcagcaaacatgcgaagcaggctaagtttcttttaccctcgtttgcttttgcctgcccctggcagcctgattgtgagggcatctccaagctctcctatatccccaacacggctgtgggctaagaaaggtcacccttccctgaccgcagttccctgcaatccattttacacacgtcttctattgtcaagtctagatgtctggttcttcaagagtgagaacgaccagtctatttcgtgcctaatctagtggttgggaatcctggctgactttagaatcacccaggaagctttaaaaatatggacttcaggactgcacgcccagaggttctttttcagtccctctgaggtgaggcccaggaaccatcacatactaaaagctcccaggtgattccaacatgcatctgtgttgagaatcacaaatccaaacagtcactagatagcatatcttaagaaggcattctataggagaaattcaggttaggtaaaacaagagttagtcactaggggaaatatataagacagataacttcaggtgggcaggaatctacaagtaacataaatgattttttttttttttttgagacagggcctcactctattgcccaggctggagtgcaatgacacaatcatggctccctgcagcctcaacctcctgggctcaagtgatcctcccacctcagcctccagaacagctgggactattgacacgtgccaccacacctaactaatgtttgcattttttgtagagacaggttctcactatgttgcccaggctggtctcaaactcctgggctcaagcaatcctcccatcttggcctcctgaagtgctgggattacaggcataagccactgcgcccagcccataaaagacctctgacagctgtctacttggtaaccatatcacaaaataaaatccaaaaaatctaagccaaaaccaaaatcttattctttttttttaagagacagagtcttgctttgtttccaaagctggagggcagtggcatggtcatagctcactccagcctggaactcctgagctcaagtgatgcacccacttcagccacctgagtaactgggactcaggtaggagccatgacagtaaattagccaaagtctattacctaaaacctaaccccaccccaggaaacaaacaaacaaacttctaaccctagttataacttttctgcctcaaaatccagatatggaagcaaagacggtgtagtggttaagagccaggctttgatcagagacatgccctgctttttaccccagctctggttatggctagaaataaaccatgggccagttaggatctcttccaggctcacctcattcacttgcaggagggataataccagaagctgtttcatgggtttcttgaatgtgccataaaatccataaaaactgcttagcaaagtacttctacagttgtgattatgacactttcatttgggtatgtgagtatataagtactgacacaatgataattgctttatttacttagagatgaggtctccctatgttgctcaggctggttttgagctcctgggctcaagcgatcctcctgccttagcctcctgagtagctgggactacaggtgagagccattgcagcaactggtttctgacctcccccggctgcacactgctgtctgtttccccagtgtcattacacccacactgctgccctgccttaacatgtgtctccctatccactgactcatttgtactcctccttcccatcaccaccagctctacatcatcatcctgcaataccctgcccttctctgagccctacctttgcctagaacacaagacaaaagaaagaaccttatccccaatgtgtacatggggattaagagaatttcttttacattccaattcccaaagtggtggtgaaaggaaaggcttctgccccaaactccacggttcttcaaggagagaggctgccctctgggccataggaagcagaggcccaagcctgctgaccacacagcagatactggacaaaacatgtggtctgagaagctggatggagaattggaggcaggtctaggcactgctgagattcagataaagagggactaatcatggcaggtgcccagggggtaggtacagtctgcatcagctttttaaaggagttagagaaagcaaacagtttgcctccaccttctcatagcactaccgtgagaggggaaaagagaaaaaaccaagacaatacaagaaaaaaaaatttttttttgaaacagggtcttgctctttagcccaggctggagtgccgtggtgcaatctcagctcactgcaacctccactccccatgttcaagcaattctcctacctcagcctcctgagtagctgggattacaggtgcccaccaccacacccggctaattttttttgtatttttagtagagatggggttttgccatgttggccaggctggtgttgaactcctgacctcaggtgatccacccacctcagcctcacaaagtgctggaattacaggcatgagccaccatgcccggccatgatttaaaaaaaaaaaaatcatactaacttctgtgcatcaaaggacacagttaaccaaatgaaaagacaacccacagaataggagaaaatatttgtaaatcatatatctgatatggggttaatatctagaatacataaagaactcctacaaggcaacaacaaaagccaaacctggtctgaaaatgagaaaagaacttgaacagaactttctctgaagaagctctataaatggccaacaagcagtgaaaatgtgctcagcatcacttatcattagggaaacggaaatcaaaactacagtgagataccacctcacactcattagaatggctactataaaaaagaaaaaataaataaaaataacgtgttcttaggatatggagaaattggaacccttgtgtgctgttggtgggaaatggtgcagatggtatctaaaacagtagagcagttcttcaaaatatttaacagaattaccgtatgattcagaaatttcacttctgagtatataccccagagaattcaaagcagggtcttgaagagatatttgtgcaccaacactcataacagcattaacaataacaaaaaggtagaagtaatccaggtgttcatcaacagataactaaacaaaatttggtatatggtaccatggagtatttatacagtcttttttaaaggaagggaattccgacacatgctacaacatagttgaacccggaggacattatgctgagtgaaataaactactcataaaggaaaaaatgctgtatgtttccacttatatgaggtacccagagtagtaagattcacagagatggcaaatagaatggtggttaccagggctgggagaatgaggcaatgaggagttatcattcaatgggtgaggagtttcagttttgcaagatgaaaacagttctggagactggttgcacaatgtgagtgtacctaacactactgaactgtacatttaaaaattattacggccgggcgcggtggctcacacctgtaattccagcactttgcgaggccgaggcgggtggatcacctgaggtcgggagtttgagaccaacctgaccaacatggagaaaccccatctctactaaaaatacaaaattagccgggcgtggaggtgcaatgcctgtaatcccagctacttgggaggctgaggcaggaaaatcgcttgaacccgggaggtggaggttgcagtgagccaagatctcaccattgcactccagcctgggcaacaagagcaactccgtctcaaaaaaaaatatatatatatatatatataaagatggaaaattgtacactatgtgcacttggccacaattttttttaaaagtcttccttccactcaccccacttcggctcatctctttttgctttctcataaaggtctctcctgttgatcgcagcgaagatccacacggccatggcccacgccttctcctccccattgaagtcgatcattagcgtggctagatccacatggtctgccttctctgtctgacccctcgggagggggatgcagcccttctggggaggatagtcctctaagtgcatcttaaatttcttcaagtccacatcctccaggtcctccaggtacctggccagcttgcagcgggtgcttgccatcttcatctgcagctgttttcagggtccttaggcttcggtccacactaagataccaggcagtgaacacggcacacggatgagtcttttttaaagtctccactttgagagatataaattatcaaaaactcagcaaacagaaagaaaaaaatgtcacatgactgtaacaagtcaaaatctttaattttgaaaagttagccaaggccgggcacagtggctcacgcctgtaatcccagcactttgagaggccaaggcaggcagatcacctgagctgaggaattcaagaccagcctggccaacatggcaaaactgtgtctctactaaaagtacaaaaatgagccgggtgtggtggcgggcgcctgtaatcccagctactcaggaagttgaggtaggagaattgattgaacccgggaagtggaggctgcagtgagccaagatcacgccactgcactccagcctaggcgacacagcaagactccatctcaaaaaaaaaaaagttagccaaatgcttaccagaaagttctcctgttggctcgatccaggagtgtgtcctgagccatggaagaaaggtttccctatggagggaaaaatatgcaaacaaatccataaacaggattgtattacagtttacggtgaacaaccacttcacgatgccatcttgacccatcagcaagaaaatttttgtcccgttgattacggggctatgacattggacaaactcttcactattcctcaacttcagtttcctcatctacaaaatgagaaagcagaagagaatgttttcagttcctccaaactgaaggctctggctctttgcttctgtttttgtgagggaagagggatgagagacaatagaaggagaaggccaggaggtgagtaagtgtgttgataacagaacaggacgtggctagggagagaggagagagaacataaaagcttgcagaggaggggacagtctttgactgcacttctatcaaccagtggattgaagtgagatgaagctgggagtgcataatggagaataataaaaacatacatccctgtaatcccagcactttgggaggccgaggtgggcggatcacctgaggtcaggagttggagaccaggctcaccaaacaacagggagaaatcccgtctctactaaaaatacaaaaattaaccgggcatggtaccaggcacctgtaatcccagctactcgggaggctgaggcaggagaatcgcttgaacccaggaggcggaggttgcgatgagccaagatcacaccactgcactccagcctgggcaataagagcaaaactccatctcaaaaaataaaatagaataaaataaaataaataaaaacatacatcctttaatgtctccttgcaaaattcgcaattgttatcattataattcacattaatttagagctttccacaggctaggcactcactgatgtttttccccatctaacctgcacagagctctatgaggtgcacctattcctagccccattttatagatgcataaactgagtcttagggggactaggaagcctgccgaggggtttagaaccaggaaggaacagagccaggattttgaccagagatatgagaccatgtcttccatcacttgtttcagtcagacaaagacaaagacaacaaaatagatgactaaaagacacacttccccagcatttatcacaggtgtatcactgcagcattcaccaacatagtcttcccaactagactgtgagttccacaaaaactagcaatcacctgctgtatctttagatcttccatatctcctagagtccggatggatgaacaagttggctttgtttggaattgttccctccttgatcccttgattatactctatttggcaaagcacctcaacctaaagccataaataacactcaagggaggcagagagcctggaaaacggtggagctctccaaattggaatttctgtgactgcagttcaatgtcaagatgcctcagactcactcatctctcccgtcccatctccattcctgcctatctactcctcgcctcctgagccctgcaaacccagccctgtgcatcctgaggtgactgctctccagacagccctattagctccgcataccctcccagctcctgcccatcctgaggtgactgctctccagacagccctattagctccgcataccctcccagctcctgccccatcagtccttccatctgcatcaggattctgcctttcttctgtgctccttccaccctaacaccagcacaaaaatctgctgccctttggtctttaaggaggtttgtttccttctgtatatcccatccatcttctcccctgggagggatactgggcaaatctgctgaagtcgtgggtgtaaactatggttgctgccgctgtcctccccgcttccccccgccacatacacacacacgaacttgcacac

SEQ ID NO: 2 - protein, 1036 aa, synthetic construct
  REGION 1..1036: note = NLRP3 Canonical
MKMASTRCKLARYLEDLEDVDLKKFKMHLEDYPPQKGCIPLPRGQTEKADHVDLATLMIDFNGEEKAWAMAVWIFAAINRRDLYEKAKRDEPKWGSDNARVSNPTVICQEDSIEEEWMGLLEYLSRISICKMKKDYRKKYRKYVRSRFQCIEDRNARLGESVSLNKRYTRLRLIKEHRSQQEREQELLAIGKTKTCESPVSPIKMELLFDPDDEHSEPVHTVVFQGAAGIGKTILARKMMLDWASGTLYQDRFDYLFYIHCREVSLVTQRSLGDLIMSCCPDPNPPIHKIVRKPSRILFLMDGFDELQGAFDEHIGPLCTDWQKAERGDILLSSLIRKKLLPEASLLITTRPVALEKLQHLLDHPRHVEILGFSEAKRKEYFFKYFSDEAQARAAFSLIQENEVLFTMCFIPLVCWIVCTGLKQQMESGKSLAQTSKTTTAVYVFFLSSLLQPRGGSQEHGLCAHLWGLCSLAADGIWNQKILFEESDLRNHGLQKADVSAFLRMNLFQKEVDCEKFYSFIHMTFQEFFAAMYYLLEEEKEGRTNVPGSRLKLPSRDVTVLLENYGKFEKGYLIFVVRFLFGLVNQERTSYLEKKLSCKISQQIRLELLKWIEVKAKAKKLQIQPSQLELFYCLYEMQEEDFVQRAMDYFPKIEINLSTRMDHMVSSFCIENCHRVESLSLGFLHNMPKEEEEEEKEGRHLDMVQCVLPSSSHAACSHGLVNSHLTSSFCRGLFSVLSTSQSLTELDLSDNSLGDPGMRVLCETLQHPGCNIRRLWLGRCGLSHECCFDISLVLSSNQKLVELDLSDNALGDFGIRLLCVGLKHLLCNLKKLWLVSCCLTSACCQDLASVLSTSHSLTRLYVGENALGDSGVAILCEKAKNPQCNLQKLGLVNSGLTSVCCSALSSVLSTNQNLTHLYLRGNTLGDKGIKLLCEGLLHPDCKLQVLELDNCNLTSHCCWDLSTLLTSSQSLRKLSLGNNDLGDLGVMMFCEVLKQQSCLLQNLGLSEMYFNYETKSALETLQEEKPELTVVFEPSW

SEQ ID NO: 3 - DNA, 4470 bp, synthetic construct
  misc_feature 1..4470: note = Synthetic
  source 1..4470: mol_type = other DNA
gtagatgaggaaactgaagttgaggaatagtgaagagtttgtccaatgtcatagccccgtaatcaacgggacaaaaattttcttgctgatgggtcaagatggcatcgtgaagtggttgttcaccgtaaactgtaatacaatcctgtttatggatttgtttgcatatttttccctccatagggaaacctttcttccatggctcaggacacactcctggatcgagccaacaggagaactttctggtaagcatttggctaacttttttttttttgagatggagtcttgctgtgtcgcctaggctggagtgcagtggcgtgatcttggctcactgcagcctccacttcccgggttcaatcaattctcctacctcaacttcctgagtagctgggattacaggcgcccgccaccacacccggctcatttttgtacttttagtagagacacagttttgccatgttggccaggctggtcttgaattcctcagctcaggtgatctgcctgccttggcctctcaaagtgctgggattacaggcgtgagccactgtgcccggccttggctaacttttcaaaattaaagattttgacttgttacagtcatgtgacatttttttctttctgtttgctgagtttttgataatttatatctctcaaagtggagactttaaaaaagactcatccgtgtgccgtgttcactgcctggtatcttagtgtggaccgaagcctaaggaccctgaaaacagctgcagatgaagatggcaagcacccgctgcaagctggccaggtacctggaggacctggaggatgtggacttgaagaaatttaagatgcacttagaggactatcctccccagaagggctgcatccccctcccgaggggtcagacagagaaggcagaccatgtggatctagccacgctaatgatcgacttcaatggggaggagaaggcgtgggccatggccgtgtggatcttcgctgcgatcaacaggagagacctttatgagaaagcaaaaagagatgagccgaagtggggttcagataatgcacgtgtttcgaatcccactgtgatatgccaggaagacagcattgaagaggagtggatgggtttactggagtacctttcgagaatctctatttgtaaaatgaagaaagattaccgtaagaagtacagaaagtacgtgagaagcagattccagtgcattgaagacaggaatgcccgtctgggtgagagtgtgagcctcaacaaacgctacacacgactgcgtctcatcaaggagcaccggagccagcaggagagggagcaggagcttctggccatcggcaagaccaagacgtgtgagagccccgtgagtcccattaagatggagttgctgtttgaccccgatgatgagcattctgagcctgtgcacaccgtggtgttccagggggcggcagggattgggaaaacaatcctggccaggaagatgatgttggactgggcgtcggggacactctaccaagacaggtttgactatctgttctatatccactgtcgggaggtgagccttgtgacacagaggagcctgggggacctgatcatgagctgctgccccgacccaaacccacccatccacaagatcgtgagaaaaccctccagaatcctcttcctcatggacggcttcgatgagctgcaaggtgcctttgacgagcacataggaccgctctgcactgactggcagaaggccgagcggggagacattctcctgagcagcctcatcagaaagaagctgcttcccgaggcctctctgctcatcaccacgagacctgtggccctggagaaactgcagcacttgctggaccatcctcggcatgtggagatcctgggtttctccgaggccaaaaggaaagagtacttcttcaagtacttctctgatgaggcccaagccagggcagccttcagtctgattcaggagaacgaggtcctcttcaccatgtgcttcatccccctggtctgctggatcgtgtgcactggactgaaacagcagatggagagtggcaagagccttgcccagacatccaagaccaccaccgcggtgtacgtcttcttcctttccagtttgctgcagccccggggagggagccaggagcacggcctctgcgcccacctctgggggctctgctctttggctgcagatggaatctggaaccagaaaatcctgtttgaggagtccgacctcaggaatcatggactgcagaaggcggatgtgtctgctttcctgaggatgaacctgttccaaaaggaagtggactgcgagaagttctacagcttcatccacatgactttccaggagttctttgccgccatgtactacctgctggaagaggaaaaggaaggaaggacgaacgttccagggagtcgtttgaagcttcccagccgagacgtgacagtccttctggaaaactatggcaaattcgaaaaggggtatttgatttttgttgtacgtttcctctttggcctggtaaaccaggagaggacctcctacttggagaagaaattaagttgcaagatctctcagcaaatcaggctggagctgctgaaatggattgaagtgaaagccaaagctaaaaagctgcagatccagcccagccagctggaattgttctactgtttgtacgagatgcaggaggaggacttcgtgcaaagggccatggactatttccccaagattgagatcaatctctccaccagaatggaccacatggtttcttccttttgcattgagaactgtcatcgggtggagtcactgtccctggggtttctccataacatgcccaaggaggaagaggaggaggaaaaggaaggccgacaccttgatatggtgcagtgtgtcctcccaagctcctctcatgctgcctgttctcatggattggtgaacagccacctcacttccagtttttgccggggcctcttttcagttctgagcaccagccagagtctaactgaattggacctcagtgacaattctctgggggacccagggatgagagtgttgtgtgaaacgctccagcatcctggctgtaacattcggagattgtggttggggcgctgtggcctctcgcatgagtgctgcttcgacatctccttggtcctcagcagcaaccagaagctggtggagctggacctgagtgacaacgccctcggtgacttcggaatcagacttctgtgtgtgggactgaagcacctgttgtgcaatctgaagaagctctggttggtcagctgctgcctcacatcagcatgttgtcaggatcttgcatcagtattgagcaccagccattccctgaccagactctatgtgggggagaatgccttgggagactcaggagtcgcaattttatgtgaaaaagccaagaatccacagtgtaacctgcagaaactggggttggtgaattctggccttacgtcagtctgttgttcagctttgtcctcggtactcagcactaatcagaatctcacgcacctttacctgcgaggcaacactctcggagacaaggggatcaaactactctgtgagggactcttgcaccccgactgcaagcttcaggtgttggaattagacaactgcaacctcacgtcacactgctgctgggatctttccacacttctgacctccagccagagcctgcgaaagctgagcctgggcaacaatgacctgggcgacctgggggtcatgatgttctgtgaagtgctgaaacagcagagctgcctcctgcagaacctggggttgtctgaaatgtatttcaattatgagacaaaaagtgcgttagaaacacttcaagaagaaaagcctgagctgaccgtcgtctttgagccttcttggtaggagtggaaacggggctgccagacgccagtgttctccggtccctccagctgggggccctcaggtggagagagctgcgatccatccaggccaagaccacagctctgtgatccttccggtggagtgtcggagaagagagcttgccgacgatgccttcctgtgcagagcttgggcatctcctttacgccagggtgaggaagacaccaggacaatgacagcatcgggtgttgttgtcatcacagcgcctcagttagaggatgttcctcttggtgacctcatgtaattagctcattcaataaagcactttctttatttttctcttctctgtctaactttctttttcctatcttttttcttctttgttctgtttacttttgctcatatcatcattcccgctatctttctattaactgaccataacacagaactagttgactatatattatgttgaaattttatggcagctatttatttatttaaattttttgtaacagttttgttttctaataagaaaaatccatgctttttgtagctggttgaaaattcaggaatatgtaaaactttttggtatttaattaaattgattccttttcttaattttaaaaaaaaaaaaaaa

SEQ ID NO: 4 - protein, 922 aa, synthetic construct
  REGION 1..922: note = NLRP3-2
MKMASTRCKLARYLEDLEDVDLKKFKMHLEDYPPQKGCIPLPRGQTEKADHVDLATLMIDFNGEEKAWAMAVWIFAAINRRDLYEKAKRDEPKWGSDNARVSNPTVICQEDSIEEEWMGLLEYLSRISICKMKKDYRKKYRKYVRSRFQCIEDRNARLGESVSLNKRYTRLRLIKEHRSQQEREQELLAIGKTKTCESPVSPIKMELLFDPDDEHSEPVHTVVFQGAAGIGKTILARKMMLDWASGTLYQDRFDYLFYIHCREVSLVTQRSLGDLIMSCCPDPNPPIHKIVRKPSRILFLMDGFDELQGAFDEHIGPLCTDWQKAERGDILLSSLIRKKLLPEASLLITTRPVALEKLQHLLDHPRHVEILGFSEAKRKEYFFKYFSDEAQARAAFSLIQENEVLFTMCFIPLVCWIVCTGLKQQMESGKSLAQTSKTTTAVYVFFLSSLLQPRGGSQEHGLCAHLWGLCSLAADGIWNQKILFEESDLRNHGLQKADVSAFLRMNLFQKEVDCEKFYSFIHMTFQEFFAAMYYLLEEEKEGRTNVPGSRLKLPSRDVTVLLENYGKFEKGYLIFVVRFLFGLVNQERTSYLEKKLSCKISQQIRLELLKWIEVKAKAKKLQIQPSQLELFYCLYEMQEEDFVQRAMDYFPKIEINLSTRMDHMVSSFCIENCHRVESLSLGFLHNMPKEEEEEEKEGRHLDMVQCVLPSSSHAACSHGLGRCGLSHECCFDISLVLSSNQKLVELDLSDNALGDFGIRLLCVGLKHLLCNLKKLWLVNSGLTSVCCSALSSVLSTNQNLTHLYLRGNTLGDKGIKLLCEGLLHPDCKLQVLELDNCNLTSHCCWDLSTLLTSSQSLRKLSLGNNDLGDLGVMMFCEVLKQQSCLLQNLGLSEMYFNYETKSALETLQEEKPELTVVFEPSW

SEQ ID NO: 5 - protein, 719 aa, synthetic construct
  REGION 1..719: note = NLRP3-3
MKMASTRCKLARYLEDLEDVDLKKFKMHLEDYPPQKGCIPLPRGQTEKADHVDLATLMIDFNGEEKAWAMAVWIFAAINRRDLYEKAKRDEPKWGSDNARVSNPTVICQEDSIEEEWMGLLEYLSRISICKMKKDYRKKYRKYVRSRFQCIEDRNARLGESVSLNKRYTRLRLIKEHRSQQEREQELLAIGKTKTCESPVSPIKMELLFDPDDEHSEPVHTVVFQGAAGIGKTILARKMMLDWASGTLYQDRFDYLFYIHCREVSLVTQRSLGDLIMSCCPDPNPPIHKIVRKPSRILFLMDGFDELQGAFDEHIGPLCTDWQKAERGDILLSSLIRKKLLPEASLLITTRPVALEKLQHLLDHPRHVEILGFSEAKRKEYFFKYFSDEAQARAAFSLIQENEVLFTMCFIPLVCWIVCTGLKQQMESGKSLAQTSKTTTAVYVFFLSSLLQPRGGSQEHGLCAHLWGLCSLAADGIWNQKILFEESDLRNHGLQKADVSAFLRMNLFQKEVDCEKFYSFIHMTFQEFFAAMYYLLEEEKEGRTNVPGSRLKLPSRDVTVLLENYGKFEKGYLIFVVRFLFGLVNQERTSYLEKKLSCKISQQIRLELLKWIEVKAKAKKLQIQPSQLELFYCLYEMQEEDFVQRAMDYFPKIEINLSTRMDHMVSSFCIENCHRVESLSLGFLHNMPKEEEEEEKEGRHLDMVQCVLPSSSHAACSHG

SEQ ID NO: 6 - protein, 979 aa, synthetic construct
  REGION 1..979: note = NLRP3-4
MKMASTRCKLARYLEDLEDVDLKKFKMHLEDYPPQKGCIPLPRGQTEKADHVDLATLMIDFNGEEKAWAMAVWIFAAINRRDLYEKAKRDEPKWGSDNARVSNPTVICQEDSIEEEWMGLLEYLSRISICKMKKDYRKKYRKYVRSRFQCIEDRNARLGESVSLNKRYTRLRLIKEHRSQQEREQELLAIGKTKTCESPVSPIKMELLFDPDDEHSEPVHTVVFQGAAGIGKTILARKMMLDWASGTLYQDRFDYLFYIHCREVSLVTQRSLGDLIMSCCPDPNPPIHKIVRKPSRILFLMDGFDELQGAFDEHIGPLCTDWQKAERGDILLSSLIRKKLLPEASLLITTRPVALEKLQHLLDHPRHVEILGFSEAKRKEYFFKYFSDEAQARAAFSLIQENEVLFTMCFIPLVCWIVCTGLKQQMESGKSLAQTSKTTTAVYVFFLSSLLQPRGGSQEHGLCAHLWGLCSLAADGIWNQKILFEESDLRNHGLQKADVSAFLRMNLFQKEVDCEKFYSFIHMTFQEFFAAMYYLLEEEKEGRTNVPGSRLKLPSRDVTVLLENYGKFEKGYLIFVVRFLFGLVNQERTSYLEKKLSCKISQQIRLELLKWIEVKAKAKKLQIQPSQLELFYCLYEMQEEDFVQRAMDYFPKIEINLSTRMDHMVSSFCIENCHRVESLSLGFLHNMPKEEEEEEKEGRHLDMVQCVLPSSSHAACSHGLGRCGLSHECCFDISLVLSSNQKLVELDLSDNALGDFGIRLLCVGLKHLLCNLKKLWLVSCCLTSACCQDLASVLSTSHSLTRLYVGENALGDSGVAILCEKAKNPQCNLQKLGLVNSGLTSVCCSALSSVLSTNQNLTHLYLRGNTLGDKGIKLLCEGLLHPDCKLQVLELDNCNLTSHCCWDLSTLLTSSQSLRKLSLGNNDLGDLGVMMFCEVLKQQSCLLQNLGLSEMYFNYETKSALETLQEEKPELTVVFEPSW

SEQ ID NO: 7 - protein, 979 aa, synthetic construct
  REGION 1..979: note = NLRP3-5
MKMASTRCKLARYLEDLEDVDLKKFKMHLEDYPPQKGCIPLPRGQTEKADHVDLATLMIDFNGEEKAWAMAVWIFAAINRRDLYEKAKRDEPKWGSDNARVSNPTVICQEDSIEEEWMGLLEYLSRISICKMKKDYRKKYRKYVRSRFQCIEDRNARLGESVSLNKRYTRLRLIKEHRSQQEREQELLAIGKTKTCESPVSPIKMELLFDPDDEHSEPVHTVVFQGAAGIGKTILARKMMLDWASGTLYQDRFDYLFYIHCREVSLVTQRSLGDLIMSCCPDPNPPIHKIVRKPSRILFLMDGFDELQGAFDEHIGPLCTDWQKAERGDILLSSLIRKKLLPEASLLITTRPVALEKLQHLLDHPRHVEILGFSEAKRKEYFFKYFSDEAQARAAFSLIQENEVLFTMCFIPLVCWIVCTGLKQQMESGKSLAQTSKTTTAVYVFFLSSLLQPRGGSQEHGLCAHLWGLCSLAADGIWNQKILFEESDLRNHGLQKADVSAFLRMNLFQKEVDCEKFYSFIHMTFQEFFAAMYYLLEEEKEGRTNVPGSRLKLPSRDVTVLLENYGKFEKGYLIFVVRFLFGLVNQERTSYLEKKLSCKISQQIRLELLKWIEVKAKAKKLQIQPSQLELFYCLYEMQEEDFVQRAMDYFPKIEINLSTRMDHMVSSFCIENCHRVESLSLGFLHNMPKEEEEEEKEGRHLDMVQCVLPSSSHAACSHGLVNSHLTSSFCRGLFSVLSTSQSLTELDLSDNSLGDPGMRVLCETLQHPGCNIRRLWLGRCGLSHECCFDISLVLSSNQKLVELDLSDNALGDFGIRLLCVGLKHLLCNLKKLWLVNSGLTSVCCSALSSVLSTNQNLTHLYLRGNTLGDKGIKLLCEGLLHPDCKLQVLELDNCNLTSHCCWDLSTLLTSSQSLRKLSLGNNDLGDLGVMMFCEVLKQQSCLLQNLGLSEMYFNYETKSALETLQEEKPELTVVFEPSW

SEQ ID NO: 8 - protein, 1016 aa, synthetic construct
  REGION 1..1016: note = NLRP3-6
MKMASTRCKLARYLEDLEDVDLKKFKMHLEDYPPQKGCIPLPRGQTEKADHVDLATLMIDFNGEEKAWAMAVWIFAAINRRDLYEKAKRDEPKWGSDNARVSNPTVICQEDSIEEEWMGLLEYLSRISICKMKKDYRKKYRKYVRSRFQCIEDRNARLGESVSLNKRYTRLRLIKEHRSQQEREQELLAIGKTKTCESPVSPIKMELLFDPDDEHSEPVHTVVFQGAAGIGKTILARKMMLDWASGTLYQDRFDYLFYIHCREVSLVTQRSLGDLIMSCCPDPNPPIHKIVRKPSRILFLMDGFDELQGAFDEHIGPLCTDWQKAERGDILLSSLIRKKLLPEASLLITTRPVALEKLQHLLDHPRHVEILGFSEAKRKEYFFKYFSDEAQARAAFSLIQENEVLFTMCFIPLVCWIVCTGLKQQMESGKSLAQTSKTTTAVYVFFLSSLLQPRGGSQEHGLCAHLWGLCSLAADGIWNQKILFEESDLRNHGLQKADVSAFLRMNLFQKEVDCEKFYSFIHMTFQEFFAAMYYLLEEEKEGRTNVPGSRLKLPSRDVTVLLENYGKFEKGYLIFVVRFLFGLVNQERTSYLEKKLSCKISQQIRLELLKWIEVKAKAKKLQIQPSQLELFYCLYEMQEEDFVQRAMDYFPKIEINLSTRMDHMVSSFCIENCHRVESLSLGFLHNMPKEEEEEEKEGRHLDMVQCVLPSSSHAACSHGLVNSHLTSSFCRGLFSVLSTSQSLTELDLSDNSLGDPGMRVLCETLQHPGCNIRRLCNQKLVELDLSDNALGDFGIRLLCVGLKHLLCNLKKLWLVSCCLTSACCQDLASVLSTSHSLTRLYVGENALGDSGVAILCEKAKNPQCNLQKLGLVNSGLTSVCCSALSSVLSTNQNLTHLYLRGNTLGDKGIKLLCEGLLHPDCKLQVLELDNCNLTSHCCWDLSTLLTSSQSLRKLSLGNNDLGDLGVMMFCEVLKQQSCLLQNLGLSEMYFNYETKSALETLQEEKPELTVVFEPSW

SEQ ID NO: 9-10 - skipped (2 entries)

SEQ ID NO: 11 - DNA, 16010 bp, synthetic construct
  misc_feature 1..16010: note = STAT6
  source 1..16010: mol_type = other DNA
agagctccagggagggacctgggtagaaggagaagccggaaacagcgggctggggcagccactgcttacactgaagagggaggacgggagaggagtgtgtgtgtgtgtgtgtgtgtgtgtgtgtatgtatgtgtgtgctttatcttatttttctttttggtggtggtggtggaaggggggaggtgctagcagggccagccttgaactcgctggacagagctacagacctatggggcctggaagtgcccgctgagaaagggagaagacagcagaggggttgccgaggtgaggggttgcctccgaggtgggtgcgggggcctctatgagtgcatgggggtggattcgtggggggagctctcgggatcctcccctggctgggtggatggtccccaagagatggtttcagctagtgttggtggctggtggcactgggttttagcagtttcgaactcctggaggaatctgggagggtccaggcctcagtactcccctcccccatgggtcacgttttcacagcctcacccctgcacccccagggccatggaaagtcagggaaaggaggtgaaggagtgcccctctgccctgagtcgggggaagtggccgcccctccctggaaggttgatgccagagggcagtggatccttgttaaacccctatcctgccctccactaaaggttcctgttcaagggtgtggctggggcgtgagcaagccccagatgtagacctcatggtggcccagacgagggggaatttccccctcaaaactgctccacgcttggctgctgtagacgctgagatttcccagcggcggcgccgagttaaccctcctcgtgctgaactggctccacctccccgcctgcccccaccgccacattcacgcattgggcaactcagagaagctgttttaactttcgatcctgtggtcccacaatcagaggactcgggcagataggggttgagataagcgagtttaggccaccaagcgggcggacgaggatcccagaccttgcgcttcccttctgagtttgggaggtaacactggccccgcccctcacgccgtggctcctccctcccttccccttcaaggggctgaagacaaaaggtgcccctgtcctggtcaagccaatcgacccagccttgttatgggttggggtggggagaaatgtgtcctcctgatggctggggaagaagaggggttggatatttctagccagggccatgccaggaggctggtcactctgcaaggggatgcagaggaaagcggtgcccactcactccagaggacctttctctcttgggctagagaaaggcctattggaggaacctgagcaggaggggtaaggattctgccttgaggagaaaagagctggggtaagtgggcactggaggaaagaggggcatgaaggtcttggagcagaaacgtccagagaagggacctctccattttccatccctctgagaggcctgggagaggtgagaggctgaacgtgcaacaggaggacttggggttactgggtttggggagacctggggagttgtcatcccatcctctccctcatctctgggagagggatattatgagaaacgtgaactgagaggcccctgggaaaccactggttacccagtcctccctgaacctggaaatggggatgcaaccccctcttctacttccctgtcccctcctctcctttctacctgttttcgtctctcatctttgccttctagccctccagcttcctctctcttctaggctctttcctcctagcttactaaacccgccttttttccagtctcttccatcctcttccttagttctctctactttccttttccacctctcctccttcaagtctcctcccaccttcccccacttcttaggatgatcagatttgcccctggaagggatcctaacaacacagtgcgatggttaatccccactcagattcaaagcctgctttccaaactcacttactgagtggccttgggcagagtagagaaactccttaagcctcagtttcttcatctataaaatgggatattatatattttaaaaagtgtcgtgaggcctgaaggagataatacactgagtgtaatgcctcatacacagtaagtgcttaacaaatagtagctgttattactctcccatcctcttcatcatctagccttgtggttttcatttttattttatttcatttatttatttatttattttgaggcagagtctctctctgtcgcccaggctggagtgcagtggctcgatctctgctcactgcaagctccgccccccaggttcacgccattctgtcacctcagcctccccagtagctgggactacaggcgctcgccaccacgccctgctaattttgtttttgtatttttagtagagatggggtttcactgtgttagccaggatggtcttgatctcctgacctcgtgatctgcccgcctcggcctcccaaagcgctgggattacaggcatgagccactgcgcctggccgagccttgtggttttcaaattatctcatggagtcctagaattttgagaggtttgtctagggatgcctttggcgtcaggaggtggggagagggaagtagaagcagtcgagtttcaggctttccatgcttgctttcaacagggcatcttcggtttcgtaccttttatgtaattgagattccacagattaaaagctgacattgcctaccgctttaaaaagtttggaaagttttccactcatctaacactcatattttatagatgagaagatcgaagcccacaaagggaaggctctttgcccacagaaccagagccaggtctagagctgcaactaaatcctctgccactctaagagagctctcgctctactgccctgtctccctttgcctccccatccctctggctacagctcagctcttcccacccctgtgtctatcactgaaggagttacccccatctcaggcattgactcaggatgcccctggtttaaggtggtctggccatgagtggtggtggggacggtccctaggagggctatctatgggaggtccctggctgccccaggagataggccaagtttcttgggcacccctcagagtggccttatttttctcctccaggcaacctccaagtcccagatcatgtctctgtggggtctggtctccaagatgcccccagaaaaagtgcagcggctctatgtcgactttccccaacacctgcggcatcttctgggtgactggctggagagccagccctggtgagtcctggctgctccctgctggtcccccaagtcttccctaactcatcttccttctccttagatttttctcccctcacccatggattcagaacttgagacctgttattccatgtgtagtgacctagatttagcagggagtctgtgccccatcaagaccaggctatgaatgttgacagatggagaccccatctcttaggaggctgagccgaagaggaggggggtttgggctgggacaaaggcacttctcataacagctagaagactgggaaacaaggcgcatgggtgaaagctacagagggcctagatggagaataaggagcgagaaaggaactgctgagcttttggctgtggggtaaagggtcaggagagctgaggaagccctggcctgaggtagcctcatcctgatcttcctgcagggagttcctggtcggctccgacgccttctgctgcaacttggctagtgccctactttcagacactgtccagcaccttcaggcctcggtgggagagcagggggaggggagcaccatcttgcaacacatcagcacccttgaggtggggcaggaggggaggggacaaggctgggtggggctgaggttgaactgggttgagcattgggccctggaagaaaattggttggatgctggaagcaaattggtgttcctgtggttaactgctagctagcaggcaaattagattttaaaagcatgcaaatgcacaaaaacttctggagtctacagttgtgcttccttatagtatatgtgtgaatgcaggcctggggattggagggattgaaggacatgggtaagagcaaagctcactgtttaccaccctcatttctgtagagcatatatcagagggaccccctgaagctggtggccactttcagacaaatacttcaaggagagaaaaaagctgttatggaacaggtattgtgatattccacctcccaccccaactcaatcccctgagactttggcctgagccatgacaaactagaaagaatttgaacctcagtaaaggctcagtgttctaggcccaggaatgaccaaaggaggttcctagggtcagagtgaaccccaagtcaagctcagggaatctttctatgagggactgaaggtaagaggccggggagaacagagcaagggataaggagctgattctgctaggagcaaggtcttatctccacgatattccaaaaggtcaggaagaactgccaaaggggagaggggaacaagaaaacgctatctgcagagcagagagtggaggccaggtatagagggatgagcagagtgtttcacttcttggcatctgtccttcctgtgtagttccgccacttgccaatgcctttccactggaagcaggaagaactcaagtttaagacaggcttgcggaggctgcagcaccgagtaggggagatccaccttctccgagaagccctgcagaagggggctgaggctggccaaggtgggggccagggtggttctggggagtgtgtaggagtggttgcctcttggatctcaaccttatctgaacctctaatctgtctgcacccttgatttctgcccccaaccctcagtgtctctgcacagcttgatagaaactcctgctaatgggactgggccaagtgaggtgagtaatgggctgacaggtggagaccttggtcaaagtgcagctggagggatggaagctagacctcagaaagacacaggctgaagtagggcaagggaatgccagaggagtgagaaaaagagccgtatcccaggagctgggtgtggaggcagcgtgaggccctggctcaggcccctctctgcccataggccctggccatgctactgcaggagaccactggagagctagaggcagccaaagccctagtgctgaagaggatccagatttggaaacggcagcagcagctggcagggaatggcgcaccgtttgaggagagcctggccccactccaggagaggttgggctagggctgatggggaagagggggcaagctgggggtgggcagctgaccctgctgaaggccctacaggtgagagaaagaagccaggcgggagggccttggagtggaccaagatgcataaaagccagttccagcggggctgtgcacactgtcgttcaggtcgcatcctgtacaagtgggcctagtggaggggcacaagcggggactcatccaacccaggcttctctcctcaagccccatgcctagaggaataggagggcttttccatttggtttattgggtgggaacactttccaatttgccacaaagcactgtaagtggtggcagttgtcctgggtgcaagagccgtcgggggagaggcagctgggtttccacagggggtgtaggcactgagaatgaacctcccacccagaccctaggccaacagatcacagaacccccttcagcccaggtgccttgcagccacacccactacccaccccacttctccacacatgatagcctttctccctgggtataggggaagggggtctgggccggagcaagcagccttaatcctgtgccccctgaccactgtcctggccccaggtgtgaaagcctggtggacatttattcccagctacagcaggaggtaggggcggctggtggggagcttgagcccaagacccgggcatcgctgactggccggctggatgaagtcctgagaaccctcgtcaccaggtattccccgggagctcccagtctggcctagaacagacctcgggaagaaaagaagggggctagagctgtggggagggcaccagcagggacctagcccccaactccccttgtgtcctcctcactcccagttgcttcctggtggagaagcagcccccccaggtactgaagactcagaccaagttccaggctggagttcgattcctgttgggcttgaggttcctgggggccccagccaagcctccgctggtcagggccgacatggtgacagagaagcaggcgcgggagctgagtgtgcctcagggtcctggggctggagcgtaagctgggattggacctggggttggagaagggctgttagggtgatggaggcagcctggagggctggcactgaaaagagcaagggatggggagggagggccatgggatgtggagaccctgaatggtcaaggcagaggaaagggagggacccatttagggctggaatggggtgggggcatcatgatttggccaagatggggactcctcccttaagaacccaaacagagacatggagatttagggctggtgacagtgggtagtctacactcacccatgcactcgccacacctgacgacagtgagatgagctcgttcacactctgacctcccctggcagagaaagcactggagaaatcatcaacaacactgtgcccttggagaacagcattcctgggaactgctgctctgccctgttcaagaacctggtgaggggctttggggtgcagtgaggggggcaccactaggagactgtgggactctccttggagaggatgtcaggaagcccaggaggagcggtctctgtcctcatgacctcgcccttgctctccctcaccccacccacagcttctcaagaagatcaagcggtgtgagcggaagggcactgagtctgtcacagaggagaagtgcgctgtgctcttctctgccagcttcacacttggccccggcaaactccccatccagctccaggtgaaccgtggcccagccctgccccaatctgggaccccgagtcctcctccaatgccacacacaagggccctggaccctcacctcttgtgactgccccataccccatgtgtctgggattcatgcacactggggcccgggtgagtgggggtgagcaagagcatggagtgcacagggcagggaatggtagtggatagcagcaaacacttcggaagcacttcctatagaccagggcactctattaaatgatacatacgcacatgcgtgccagcacacacacgtctggttttcacaataacattatgaggtaggcagtattatcagcctcattttatagataaggacattgagacagagagtttaagtagtttgtcccagtcacacagctaagtgttggagctggtatttgaaacctggaggtctggttccatagcgatgactaataaccacttctctacggtgaggccctgattgagcttcagaacgcatttaataacatggcatgagctttttgattatgatgtgtgagtccaataacttctctgagtgctcagagccagtcccctgaggaaacttcttgcttcactaagaaacccctgtccggctgggcatggtggctcaagcctgtaatcccagcactttgggaggccgaggtgggtagatcacaaggtcaggagttcaagaccagcctggccaatatggtgaaaccccgtctccactaaaaatacaaaaattagctgggcgtggtggtgcaggcctgtagtcccagctgctcgggaggctaagcaggagaatcgcttgaacccaggaggcggaggttgcagtgagccaagattgcgccactgcccttcagcctgggcgacagagcaagactatgtctcaaaaacaaaacaaaacaactcagcactttgggaggccaaggtaggaggatcgcttgagcctgcaagtttaagaccagcctgggctacatagggagatccaatctctacaaaaaataaaaaattggccgggcatggtggctcacgcctgtaatcccagcactttgggaggccaaggcgggcggatcatgaggtcaggaaatcgagaccatcctggctaacacggtgaaacctcgtatctactaaaaatacaaaaaattagccaggcatggtggcgggcgcctgagtcccagctactcgggaggctgaagcaggagaatggcgtgaacctgggagggagagcttgcagtgagccaagatcgcgccactgcactccagcctgagtgacagagcgagactctgtctcaaaaataaataaataaataattagctggattaggtggtacatttctgtagttccagctattcaggaggctgaggtggaaggatcacttgagccctgaaggctgaggctgcagtgagctgagattgcactactgcactccagcctgggcaacagagtgagatactatctaaaaaaaaaaaaaaaaaaaaaaaaaaaaaaaaaaaaaaaaaaaaaaaaaggaaagaaagaaagaaaagaaacccctgtcctcaccctcttcaggccctgtctctgcccctggtggtcatcgtccatggcaaccaagacaacaatgccaaagccactatcctgtgggacaatgccttctctgagatggtgaggaaagtcctggagttggagggaacaggggcagggtgggttctaacatgggcagtggtgcaggcctgctgatggggtggtgggcatgtttaaatgggtgtgaccttaacactttctcatgggcctgctttcgtgcttctgacctcttttcaccccagtcttaacaactatcaggccacagcactgtaacctagaaaaaacagcatgtttgtgagcgatatcaggggctgtggaggggtaggccacaggcaggtgggagggatgaaggccggcccgaggaataacaagacggtagcctgcagtgctctcttcttcccccttctccccaggaccgcgtgccctttgtggtggctgagcgggtgccctgggagaagatgtgtgaaactctgaacctgaagttcatggctgaggtggggaccaaccgggggctgctcccagagcacttcctcttcctggcccagaagatcttcaatgacaacagcctcagtatggaggccttccagcaccgttctgtgtcctggtcgcagttcaacaaggtcattctcctgccctttggacctcccacccccaagctcttcatccctggggcactcagggcctgctcagcctccatgcagggaccttccactggattctccacagtgccccctcaggtcctttaggaaggcctgtcatggaccagggaggaaaaaccccaggcctgggggttggctctggagatgcgttctctgacatccctgaggttttggtctgggggccatctgtccttcctctttaccagtgacttgcatgactcacccaggttgtgtgtaaacagagctctgattcaaagtgactttgacctgttggaaaaatagttcctggccgggcacagcggctcatgcctgtaatcccagtctttgacatgccggggtgggtggatcacctgaggtcaggagtttgagaccagcctggccaacatggtgaaactccatctctactaaaaatacaaaaattagccagttgcggtggcacatgcctgtaatcccagctacatgggaggctgacgcaggagaattgcttgaacccaggaggtggaggttgcagtgagctgagatcataccactgcactcaagcctgggtgacagagcaagactctgtctcaaaaaaaaaaaaaaaaaaaggccaggcatggtggttcatgcctgtaatcccagcactttgggaggccgagacggatagatcacctgaggtcaggagttcgagaccagcctggccaacatggcaaaaccccgtctctactaaaaacaaaaaaatagccaggagtggtcgtttgcgtctgtaatcccagctactcggctgaggcaggaggtgaacccaggaggtagaggctgcagggaagatgaaaccattgcactccagcctgggcaagactctgtatcaaaaaaaaaaaaaaaaaaggctaggtgtggtggctcacacctgtaatcccagcactttgggaggctgaggcgggcggatcacaaggtcaagagatcgagaccatcctgaccaacatggtgaaaccccgtctctactaaaaatacaaaaattacctgggcatggtggcgcatgcctgtagtcccaactactcgggaggctgaggcaggagaatcacttgaacctgggaggcagaggttgcagcgagccaagattgtgccactgcactccagcctgccaacagaatgagattctgtctaaaaaaaaaaagaaagaaagaaagaaagaaaaagaattcctgttgcaaaaactgaacaaaatcccacagggacatgtgcagtaataccagctaccacgtgttgacagcttatatgccaggcgctgtgcttaacaccttatgtatgttatctcacttaatcctcccaacatctctttgaggtagatactattattatccccattttacagatgaggaatctgatgctcagagggttatgtagtttgttcaagttcccaaagcaggtgagtgccatggctaggagagaaccacatatttctgactcttgctcttttattttatgttatattatgttattttatgttttggtttttttttcttttctttctttctttctttctttctttctttctttctttctttctttctctttctttctttctttctttctttctttctttctttctttctttctttctttctttctttctctttctctttctctctttttctttcttttgtgtgagacagaatctttaaagagaagaaagaaatgctcatgtgaccagagggtgtgttagctaaagggagcaagacagtcacacccagcaggttaccttcctttgggcgtcacctctgccacacctccttagggagagggtgtagcatagtagttaagaggggctccagggccagaatgcctgggtttaaatcctagctctgcctcttaccagctatgtagacctgggcaagtcattcgacgtttttggacttccatttcttcatctgtaagatggaattattataatccctacttccatagcctggtaaagagcaaataaatatatggaaaggcttgaaatagtggctggcacgtgtaagcattaggattggtcgttgtcattgatggagtctcaggttcggtctgatcctcagccctgtgattctgtcgtgagggcactcacagctcactgcctgccctaaacaggctccagctctggccctccctcggctcacacctttccccctctccccctaggagatcctgctgggccgtggcttcaccttttggcagtggtttgatggtgtcctggacctcaccaaacgctgtctccggagctactggtctgaccggtgagtccccaccctgggtagtctgagcagccatacaccagtcacctccatactcactgcccatgccccatcctctccttcatcccggccaggctgatcattggcttcatcagcaaacagtacgttactagccttcttctcaatgagcccgacggaacctttctcctccgcttcagcgactcagagattgggggcatcaccattgcccatgtcatccggggccaggatggtgaggccaccccagccagtcctctgtctctgtgcctgtgccctctggggtttcttctgggaatgaaatgtcctgaccttcctgatgccgatcctgatcttcaggaagttcttccagcttctcttcttccttctgtggtctaaatgttcaccttctcactgtgagctctgtgggaacggagactagtgggtctctctccctcaggagccccaccctaggtcctctctcccttgccttggtggagtgagaacaggtcttatggtaggggttggggaaggggaagaaagtccggacagagggatctcagggtctccttcctaccataggctctccacagatagagaacatccagccattctctgccaaagacctgtccattcgctcactgggggaccgaatccgggatcttgctcagctcaaaaatctctatcccaagaagcccaaggatgaggctttccggagccactacaagcgtgagctggaactggcagctctgattccttcctgtcacccacttcctccctgctccccgctgccctcctctccctgcccgcgtgtcatcctgatgtcactccctatttcatagctgtgcttctcttacttccccatgatccatgcccaccttttccacctcccttcctccctaaccccagagcactccatggctgtcttttccttctcacaacagctgaacagatgggtaaggatggcaggggttatgtcccagctaccatcaagatgaccgtggaaaggtgagtgtggtggtatggacagtgggtaggtcaggggcttagtgcttatctgcaggaaggaggggtggcatcaacccttggtcagtcacatgtacctccttccctcctccagggaccaaccacttcctaccccagagctccagatgcctaccatggtgccttcttatgaccttggaatggcccctgattcctccatgagcatgcagcttggcccagatatggtgtaaggagctggaaagacaggaatgggagtggtctgtgcagatgggctaatcttagcatgggcagctgggagagctggcactgggggctgaacagggaatcttcctttccatgagagggacacctgttcaaaagcagggtgtggtggtgtccaggagaagggctggcatcagggggtctgttttctttccccaggccccaggtgtacccaccacactctcactccatccccccgtatcaaggcctctccccagaagaatcagtcaacgtgttgtcagccttccaggagtaagtgaaaaacctcatggggataccatcccactctaagggggtgggcatttgaattgttagaagaggctcttctgtgagaaaggagcagcaaatgctaacagcctgtcttcttctcttctgtccactctaatgagggggtagtagttaagatctggactgcctaggtttgaattctagctccaccacttactggtttggggcaaattacttagcctttggtgccttatctgcacaatgggggataataatgctaataataataacctacctcactgcattattgtggagattaaatgagttcataacacttaaaaagctgagcatagtgcatggctcatagcaaaagctgtgtaagtccagtcgtggatcacttaatgaaggagcattttctgtctttggcagtttcataattatgcgaataccattgagtataattacacaaacctagatggtatagactactatacactgaggctatattgtgtagcctattgatcctagctttaaacccgagcagcatgatactgttctgaatagtataaggaaatagtaacataatggtaaatatttgtgtgataggaattttcagcttgattataattttttttttttgagacagggtctcactcactggagtgcagtggtgcgatcttagctccctgcaacctccgcctcttgggctcgagcaatcctcctgctgtagtgcaccacgacactcggctaattcttttttaagatttttctgcagacaaggtctcacttactgcccaagctggtctcaaactcctgggcttaagtgatcctcccacctcggcctcccaaagcgttaggattacaggcgtgagtcactctgcctggccttgattataatcttatgggaccactgtggtctgtagttgacagaaatgtcgttaatgtggtgcatgactgttattattattttctgtcctgcccctgagagccactgtcacttctctgctgtattggtttttgtttactcatctgttttggccttgaaatggcctagacatttttcttcccgaagtatgacactcgggtgcttattaacttagtcaagacacaacatctcccttcccagaaggtgaggcgggagtgaggacttggggacttaagaactaccaaagttcagagtccaaagaaacattagaaattggctaatccacccccataacacgcacattttacagatgagaagactgagctcagagcatagaaatagcttgcccaggccatgactaagtcaggataaggagctggagcttgtttcctcactcagtggtcctgactttgcaccactctgcatttgcctagcctgccttcctctaactgtgctctccctacttccaggcctcacctgcagatgccccccagcctgggccagatgagcctgccctttgaccagcctcacccccagtgagtgacaaagcccctcctgaccccatgtgcctcttctttcctggccttgccccgctctccttatttccattgctggttcctggcaggggcctgctgccgtgccagcctcaggagcatgctgtgtccagccctgaccccctgctctgctcagatgtgaccatggtggaagacagctgcctgagccagccagtgacagcgtttcctcagggcacttggtgagtggcagcttgggagtggaggctgggtggcatctaggggagtgggcgccatgcctactccactgcttctcccatctccttgcaggattggtgaagacatattccctcctctgctgcctcccactgaacaggacctcactaagcttctcctggaggggcaaggggagtcggggggagggtccttgggggcacagcccctcctgcagccctcccactatgggcaatctgggatctcaatgtcccacatggacctaagggccaaccccagttggtgatcccagctggagggagaacccaaagagacagctcttctactacccccacagacctgctctggacacttgctcatgccctgccaagcagcagatggggagggtgccctcctatccccacctactcctgggtcaggaggaaaagactaacaggagaatgcacagtgggtggagccaatccactccttcctttctatcattcccctgcccacctccttccagcactgactggaagggaagttcaggctctgagacacaccccaacatgcctgcacctgcagcgcgcacacgcacgcacacacacatacagagctctctgagggtgatggggctgagcaggaggggggctgggtaagagcacaggttagggcatggaaggcttctccgcccattctgacccagggcctaggacggataggcaggaacatacagacacatttacactagaggccagggatagaggatattgggtctcagccctaggggaatgggaagcagctcaagggaccctgggtgggagcataggaggggtctggacatgtggttactagtacaggttttgccctgattaaaaaatctcccaaagccccaaattcctgttagccaggtggaggcttctgatacgtgtatgagactatgcaaaagtacaagggctgagattcttcgtgtatagctgtgtgaacgtgtatgtacctaggatatgttaaatgtatagctggcaccttagttgcatgaccacatagaacatgtgtctatctgcttttgcctacgtgacaacacaaatttgggagggtgagacactgcacagaagacagcagcaagtgtgctggcctctctgacatatgctaacccccaaatactctgaatttggagtctgactgtgcccaagtgggtccaagtggctgtgacatctacgtatggctccacacctccaatgctgcctgggagccagggtgagagtctgggtccaggcctggccatgtggccctccagtgtatgagagggccctgcctgctgcatcttttctgttgccccatccaccgccagcttcccttcactcccctatcccattctccctctcaaggcaggggtcatagatcctaagccataaaataaattttattccaaaataacaaaataaataatctactgtacacaatctgaaaagaaa

SEQ ID NO: 12 - protein, 847 aa, synthetic construct
  REGION 1..847: note = STAT6 Amino Acid
MSLWGLVSKMPPEKVQRLYVDFPQHLRHLLGDWLESQPWEFLVGSDAFCCNLASALLSDTVQHLQASVGEQGEGSTILQHISTLESIYQRDPLKLVATFRQILQGEKKAVMEQFRHLPMPFHWKQEELKFKTGLRRLQHRVGEIHLLREALQKGAEAGQVSLHSLIETPANGTGPSEALAMLLQETTGELEAAKALVLKRIQIWKRQQQLAGNGAPFEESLAPLQERCESLVDIYSQLQQEVGAAGGELEPKTRASLTGRLDEVLRTLVTSCFLVEKQPPQVLKTQTKFQAGVRFLLGLRFLGAPAKPPLVRADMVTEKQARELSVPQGPGAGAESTGEIINNTVPLENSIPGNCCSALFKNLLLKKIKRCERKGTESVTEEKCAVLFSASFTLGPGKLPIQLQALSLPLVVIVHGNQDNNAKATILWDNAFSEMDRVPFVVAERVPWEKMCETLNLKFMAEVGTNRGLLPEHFLFLAQKIFNDNSLSMEAFQHRSVSWSQFNKEILLGRGFTFWQWFDGVLDLTKRCLRSYWSDRLIIGFISKQYVTSLLLNEPDGTFLLRFSDSEIGGITIAHVIRGQDGSPQIENIQPFSAKDLSIRSLGDRIRDLAQLKNLYPKKPKDEAFRSHYKPEQMGKDGRGYVPATIKMTVERDQPLPTPELQMPTMVPSYDLGMAPDSSMSMQLGPDMVPQVYPPHSHSIPPYQGLSPEESVNVLSAFQEPHLQMPPSLGQMSLPFDQPHPQGLLPCQPQEHAVSSPDPLLCSDVTMVEDSCLSQPVTAFPQGTWIGEDIFPPLLPPTEQDLTKLLLEGQGESGGGSLGAQPLLQPSHYGQSGISMSHMDLRANPSW

SEQ ID NO: 13 - DNA, 3963 bp, synthetic construct
  misc_feature 1..3963: note = STAT6
  source 1..3963: mol_type = other DNA
ggggcagccactgcttacactgaagagggaggacgggagaggagtgtgtgtgtgtgtgtgtgtgtgtgtgtgtatgtatgtgtgtgctttatcttatttttctttttggtggtggtggtggaaggggggaggtgctagcagggccagccttgaactcgctggacagagctacagacctatggggcctggaagtgcccgctgagaaagggagaagacagcagaggggttgccgaggcaacctccaagtcccagatcatgtctctgtggggtctggtctccaagatgcccccagaaaaagtgcagcggctctatgtcgactttccccaacacctgcggcatcttctgggtgactggctggagagccagccctgggagttcctggtcggctccgacgccttctgctgcaacttggctagtgccctactttcagacactgtccagcaccttcaggcctcggtgggagagcagggggaggggagcaccatcttgcaacacatcagcacccttgagagcatatatcagagggaccccctgaagctggtggccactttcagacaaatacttcaaggagagaaaaaagctgttatggaacagttccgccacttgccaatgcctttccactggaagcaggaagaactcaagtttaagacaggcttgcggaggctgcagcaccgagtaggggagatccaccttctccgagaagccctgcagaagggggctgaggctggccaagtgtctctgcacagcttgatagaaactcctgctaatgggactgggccaagtgaggccctggccatgctactgcaggagaccactggagagctagaggcagccaaagccctagtgctgaagaggatccagatttggaaacggcagcagcagctggcagggaatggcgcaccgtttgaggagagcctggccccactccaggagaggtgtgaaagcctggtggacatttattcccagctacagcaggaggtaggggcggctggtggggagcttgagcccaagacccgggcatcgctgactggccggctggatgaagtcctgagaaccctcgtcaccagttgcttcctggtggagaagcagcccccccaggtactgaagactcagaccaagttccaggctggagttcgattcctgttgggcttgaggttcctgggggccccagccaagcctccgctggtcagggccgacatggtgacagagaagcaggcgcgggagctgagtgtgcctcagggtcctggggctggagcagaaagcactggagaaatcatcaacaacactgtgcccttggagaacagcattcctgggaactgctgctctgccctgttcaagaacctgcttctcaagaagatcaagcggtgtgagcggaagggcactgagtctgtcacagaggagaagtgcgctgtgctcttctctgccagcttcacacttggccccggcaaactccccatccagctccaggccctgtctctgcccctggtggtcatcgtccatggcaaccaagacaacaatgccaaagccactatcctgtgggacaatgccttctctgagatggaccgcgtgccctttgtggtggctgagcgggtgccctgggagaagatgtgtgaaactctgaacctgaagttcatggctgaggtggggaccaaccgggggctgctcccagagcacttcctcttcctggcccagaagatcttcaatgacaacagcctcagtatggaggccttccagcaccgttctgtgtcctggtcgcagttcaacaaggagatcctgctgggccgtggcttcaccttttggcagtggtttgatggtgtcctggacctcaccaaacgctgtctccggagctactggtctgaccggctgatcattggcttcatcagcaaacagtacgttactagccttcttctcaatgagcccgacggaacctttctcctccgcttcagcgactcagagattgggggcatcaccattgcccatgtcatccggggccaggatggctctccacagatagagaacatccagccattctctgccaaagacctgtccattcgctcactgggggaccgaatccgggatcttgctcagctcaaaaatctctatcccaagaagcccaaggatgaggctttccggagccactacaagcctgaacagatgggtaaggatggcaggggttatgtcccagctaccatcaagatgaccgtggaaagggaccaaccacttcctaccccagagctccagatgcctaccatggtgccttcttatgaccttggaatggcccctgattcctccatgagcatgcagcttggcccagatatggtgccccaggtgtacccaccacactctcactccatccccccgtatcaaggcctctccccagaagaatcagtcaacgtgttgtcagccttccaggagcctcacctgcagatgccccccagcctgggccagatgagcctgccctttgaccagcctcacccccagggcctgctgccgtgccagcctcaggagcatgctgtgtccagccctgaccccctgctctgctcagatgtgaccatggtggaagacagctgcctgagccagccagtgacagcgtttcctcagggcacttggattggtgaagacatattccctcctctgctgcctcccactgaacaggacctcactaagcttctcctggaggggcaaggggagtcggggggagggtccttgggggcacagcccctcctgcagccctcccactatgggcaatctgggatctcaatgtcccacatggacctaagggccaaccccagttggtgatcccagctggagggagaacccaaagagacagctcttctactacccccacagacctgctctggacacttgctcatgccctgccaagcagcagatggggagggtgccctcctatccccacctactcctgggtcaggaggaaaagactaacaggagaatgcacagtgggtggagccaatccactccttcctttctatcattcccctgcccacctccttccagcactgactggaagggaagttcaggctctgagacacaccccaacatgcctgcacctgcagcgcgcacacgcacgcacacacacatacagagctctctgagggtgatggggctgagcaggaggggggctgggtaagagcacaggttagggcatggaaggcttctccgcccattctgacccagggcctaggacggataggcaggaacatacagacacatttacactagaggccagggatagaggatattgggtctcagccctaggggaatgggaagcagctcaagggaccctgggtgggagcataggaggggtctggacatgtggttactagtacaggttttgccctgattaaaaaatctcccaaagccccaaattcctgttagccaggtggaggcttctgatacgtgtatgagactatgcaaaagtacaagggctgagattcttcgtgtatagctgtgtgaacgtgtatgtacctaggatatgttaaatgtatagctggcaccttagttgcatgaccacatagaacatgtgtctatctgcttttgcctacgtgacaacacaaatttgggagggtgagacactgcacagaagacagcagcaagtgtgctggcctctctgacatatgctaacccccaaatactctgaatttggagtctgactgtgcccaagtgggtccaagtggctgtgacatctacgtatggctccacacctccaatgctgcctgggagccagggtgagagtctgggtccaggcctggccatgtggccctccagtgtatgagagggccctgcctgctgcatcttttctgttgccccatccaccgccagcttcccttcactcccctatcccattctccctctcaaggcaggggtcatagatcctaagccataaaataaattttattccaaaataacaaaataaataatctactgtacacaatctgaaaa

SEQ ID NO: 14 - protein, 673 aa, synthetic construct
  REGION 1..673: note = STAT6 Iso 2
MEQALAMLLQETTGELEAAKALVLKRIQIWKRQQQLAGNGAPFEESLAPLQERCESLVDIYSQLQQEVGAAGGELEPKTRASLTGRLDEVLRTLVTSCFLVEKQPPQVLKTQTKFQAGVRFLLGLRFLGAPAKPPLVRADMVTEKQARELSVPQGPGAGAESTGEIINNTVPLENSIPGNCCSALFKNLLLKKIKRCERKGTESVTEEKCAVLFSASFTLGPGKLPIQLQALSLPLVVIVHGNQDNNAKATILWDNAFSEMDRVPFVVAERVPWEKMCETLNLKFMAEVGTNRGLLPEHFLFLAQKIFNDNSLSMEAFQHRSVSWSQFNKEILLGRGFTFWQWFDGVLDLTKRCLRSYWSDRLIIGFISKQYVTSLLLNEPDGTFLLRFSDSEIGGITIAHVIRGQDGSPQIENIQPFSAKDLSIRSLGDRIRDLAQLKNLYPKKPKDEAFRSHYKPEQMGKDGRGYVPATIKMTVERDQPLPTPELQMPTMVPSYDLGMAPDSSMSMQLGPDMVPQVYPPHSHSIPPYQGLSPEESVNVLSAFQEPHLQMPPSLGQMSLPFDQPHPQGLLPCQPQEHAVSSPDPLLCSDVTMVEDSCLSQPVTAFPQGTWIGEDIFPPLLPPTEQDLTKLLLEGQGESGGGSLGAQPLLQPSHYGQSGISMSHMDLRANPSW

SEQ ID NO: 15 - protein, 737 aa, synthetic construct
  REGION 1..737: note = STAT6 Iso 3
MEQFRHLPMPFHWKQEELKFKTGLRRLQHRVGEIHLLREALQKGAEAGQVSLHSLIETPANGTGPSEALAMLLQETTGELEAAKALVLKRIQIWKRQQQLAGNGAPFEESLAPLQERCESLVDIYSQLQQEVGAAGGELEPKTRASLTGRLDEVLRTLVTSCFLVEKQPPQVLKTQTKFQAGVRFLLGLRFLGAPAKPPLVRADMVTEKQARELSVPQGPGAGAESTGEIINNTVPLENSIPGNCCSALFKNLLLKKIKRCERKGTESVTEEKCAVLFSASFTLGPGKLPIQLQALSLPLVVIVHGNQDNNAKATILWDNAFSEMDRVPFVVAERVPWEKMCETLNLKFMAEVGTNRGLLPEHFLFLAQKIFNDNSLSMEAFQHRSVSWSQFNKEILLGRGFTFWQWFDGVLDLTKRCLRSYWSDRLIIGFISKQYVTSLLLNEPDGTFLLRFSDSEIGGITIAHVIRGQDGSPQIENIQPFSAKDLSIRSLGDRIRDLAQLKNLYPKKPKDEAFRSHYKPEQMGKDGRGYVPATIKMTVERDQPLPTPELQMPTMVPSYDLGMAPDSSMSMQLGPDMVPQVYPPHSHSIPPYQGLSPEESVNVLSAFQEPHLQMPPSLGQMSLPFDQPHPQGLLPCQPQEHAVSSPDPLLCSDVTMVEDSCLSQPVTAFPQGTWIGEDIFPPLLPPTEQDLTKLLLEGQGESGGGSLGAQPLLQPSHYGQSGISMSHMDLRANPSW

SEQ ID NO: 16-20 - skipped (5 entries)

SEQ ID NO: 21 - DNA, 2108 bp, synthetic construct
  misc_feature 1..2108: note = CEBPb
  source 1..2108: mol_type = other DNA
ttactgcccccaaaaggctttgtaaccattctcaaaaaaaagtttattaaaagtgttcttaatgcttgaaacggaaaagattcccaaaatatacagacgcctcttttctcatagaaatagattattttttataatacaaaaaaagaccaaaaaacaaaacaaaacaaaacatcaacagcaacaagcccgtaggaacatctttaagcgattactcagggcccggctgacagttacacgtgggttgcgtcagtcccgtgtacacacgcgttcagccatgtttaaaccgattgcatcaacttcgaaaccggcccgcccgccggcgcctggagaggggcagagggagaagcagagagtttatcattcatctgtacacatagacgtttcttctttaaataacaccacgggcgggagccccatctgcatgtgcggttggtttggacaaaaatatagatatatatatataataaaatattaaaattaccgacgggctccccgcgctgccaagtgccccagtgccaaagttttgccggcgccgccgggggcgggggcgagggcgcgggcgcgggcgctccccggagtctcagccccggccggcagggggacgcgcgcgggggccgcgctagcagtggccggaggaggcgagcaggggctcgggcagctgcttgaacaagttccgcagggtgctgagctcgcgcgacagctgctccaccttcttctgcagccgctcgttctcggccgtgagctccaggaccttgtgctgcgtctccaggttgcgcatcttggccttgtcgcggctcttgcgcacggcgatgttgttgcgctcgcgccggatcttgtactcgtcgctgtgcttgtccacggtcttcttggccttgctcttgacctgcgagggcgccggcgcggcccccgcgtagcaggcggtcgggggcgccttggcgtcagcggggctcggcgtgccgggcgggctggacgaggaggacgtggagaggctcccgctgctgccgctcggcaccgcctggtagccgaggtaagcgcgcagcgcgtacgggaagcccgccgccatgcctgcgccgccgcccggcgccccggcctcctccttccgcttgcagtccgcgggctcgaagcccggctccgccttgagctcggcgggcggcggcggcggcgggggcggtgggtgcaggggcgcgaagcagccggggtgcagcgcgcccttggcggcccccaggcgccccaggctcacgtagccgtactcggccggcttcttgcagttcttgcccccgtagtcgtcggagaagaggtcggagaggaagtcgtggtgctgcccggaggaggcgggcgcgggggcgggcgcgggcggagccgcctcgaaggtgtccgtggccgtggcgggcgccggggcctgcggcgcgcccagcggctccaggtacgggctgaagtcgatggcgcgctcgtggtcgccgatgctgcccagctcgccggcgggggggcgcggcccgggtctggccgcggggggcgccgcgggggccgccttgccgccgtacgcagcagccaagcagtccgcctcgtagtagaagttggccacttccatggatttaaaggcaggcggcggcggcggcagggggagacatgctgggtcccaggccaccaggcgttgcatgaacgcgggtgcccggggagggggcctggggctgcccgctccggccggcccgcaggtggcgcggcctccctgctctgagctgtcgccgctgcgtcgctgctgctgctgccgccgctgccggggtggccgctattagtgagggggctggtggctggaccctcgggtgggtccccttcccagtcccgtgcgcggctctgactcgctaaagtttctcctgagcccggttatttataagggcggcccgtagcaaccgctgcgtcacgccggcccctcccgccgcgccgccgggacgcgaaggacacggccgcggccgcccgagacccccgggaggacggcggcagggcgcagcggagggaccgggcacccggagcgcgttttcggggggcccccgggacgcaggggcggcctcacgccccctgcccacccccgcccggccgccccgggattggga

SEQ ID NO: 22 - protein, 345 aa, synthetic construct
  REGION 1..345: note = CEBPn Amino Acid
MQRLVAWDPACLPLPPPPPAFKSMEVANFYYEADCLAAAYGGKAAPAAPPAARPGPRPPAGELGSIGDHERAIDFSPYLEPLGAPQAPAPATATDTFEAAPPAPAPAPASSGQHHDFLSDLFSDDYGGKNCKKPAEYGYVSLGRLGAAKGALHPGCFAPLHPPPPPPPPPAELKAEPGFEPADCKRKEEAGAPGGGAGMAAGFPYALRAYLGYQAVPSGSSGSLSTSSSSSPPGTPSPADAKAPPTACYAGAAPAPSQVKSKAKKTVDKHSDEYKIRRERNNIAVRKSRDKAKMRNLETQHKVLELTAENERLQKKVEQLSRELSTLRNLFKQLPEPLLASSGHC

SEQ ID NO: 23 - DNA, 2113 bp, synthetic construct
  misc_feature 1..2113: note = CEBP NM_005194.3
  source 1..2113: mol_type = other DNA
tcccaatcccggggcggccgggcgggggtgggcagggggcgtgaggccgcccctgcgtcccgggggccccccgaaaacgcgctccgggtgcccggtccctccgctgcgccctgccgccgtcctcccgggggtctcgggcggccgcggccgtgtccttcgcgtcccggcggcgcggcgggaggggccggcgtgacgcagcggttgctacgggccgcccttataaataaccgggctcaggagaaactttagcgagtcagagccgcgcacgggactgggaaggggacccacccgagggtccagccaccagccccctcactaatagcggccaccccggcagcggcggcagcagcagcagcgacgcagcggcgacagctcagagcagggaggccgcgccacctgcgggccggccggagcgggcagccccaggccccctccccgggcacccgcgttcatgcaacgcctggtggcctgggacccagcatgtctccccctgccgccgccgccgcctgcctttaaatccatggaagtggccaacttctactacgaggcggactgcttggctgctgcgtacggcggcaaggcggcccccgcggcgccccccgcggccagacccgggccgcgcccccccgccggcgagctgggcagcatcggcgaccacgagcgcgccatcgacttcagcccgtacctggagccgctgggcgcgccgcaggccccggcgcccgccacggccacggacaccttcgaggcggctccgcccgcgcccgcccccgcgcccgcctcctccgggcagcaccacgacttcctctccgacctcttctccgacgactacgggggcaagaactgcaagaagccggccgagtacggctacgtgagcctggggcgcctgggggccgccaagggcgcgctgcaccccggctgcttcgcgcccctgcacccaccgcccccgccgccgccgccgcccgccgagctcaaggcggagccgggcttcgagcccgcggactgcaagcggaaggaggaggccggggcgccgggcggcggcgcaggcatggcggcgggcttcccgtacgcgctgcgcgcttacctcggctaccaggcggtgccgagcggcagcagcgggagcctctccacgtcctcctcgtccagcccgcccggcacgccgagccccgctgacgccaaggcgcccccgaccgcctgctacgcgggggccgcgccggcgccctcgcaggtcaagagcaaggccaagaagaccgtggacaagcacagcgacgagtacaagatccggcgcgagcgcaacaacatcgccgtgcgcaagagccgcgacaaggccaagatgcgcaacctggagacgcagcacaaggtcctggagctcacggccgagaacgagcggctgcagaagaaggtggagcagctgtcgcgcgagctcagcaccctgcggaacttgttcaagcagctgcccgagcccctgctcgcctcctccggccactgctagcgcggcccccgcgcgcgtccccctgccggccggggctgagactccggggagcgcccgcgcccgcgccctcgcccccgcccccggcggcgccggcaaaactttggcactggggcacttggcagcgcggggagcccgtcggtaattttaatattttattatatatatatatctatatttttgtccaaaccaaccgcacatgcagatggggctcccgcccgtggtgttatttaaagaagaaacgtctatgtgtacagatgaatgataaactctctgcttctccctctgcccctctccaggcgccggcgggcgggccggtttcgaagttgatgcaatcggtttaaacatggctgaacgcgtgtgtacacgggactgacgcaacccacgtgtaactgtcagccgggccctgagtaatcgcttaaagatgttcctacgggcttgttgctgttgatgttttgttttgttttgttttttggtctttttttgtattataaaaaataatctatttctatgagaaaagaggcgtctgtatattttgggaatcttttccgtttcaagcattaagaacacttttaataaacttttttttgagaatggttacaaagccttttgggggcagtaaaaaaa

SEQ ID NO: 24 - protein, 322 aa, synthetic construct
  REGION 1..322: note = CEBPb Iso 2
MEVANFYYEADCLAAAYGGKAAPAAPPAARPGPRPPAGELGSIGDHERAIDFSPYLEPLGAPQAPAPATATDTFEAAPPAPAPAPASSGQHHDFLSDLFSDDYGGKNCKKPAEYGYVSLGRLGAAKGALHPGCFAPLHPPPPPPPPPAELKAEPGFEPADCKRKEEAGAPGGGAGMAAGFPYALRAYLGYQAVPSGSSGSLSTSSSSSPPGTPSPADAKAPPTACYAGAAPAPSQVKSKAKKTVDKHSDEYKIRRERNNIAVRKSRDKAKMRNLETQHKVLELTAENERLQKKVEQLSRELSTLRNLFKQLPEPLLASSGHC

SEQ ID NO: 25 - protein, 147 aa, synthetic construct
  REGION 1..147: note = CEBPb Iso 3
MAAGFPYALRAYLGYQAVPSGSSGSLSTSSSSSPPGTPSPADAKAPPTACYAGAAPAPSQVKSKAKKTVDKHSDEYKIRRERNNIAVRKSRDKAKMRNLETQHKVLELTAENERLQKKVEQLSRELSTLRNLFKQLPEPLLASSGHC

SEQ ID NO: 26-30 - skipped (5 entries)

SEQ ID NO: 31 - DNA, 32738 bp, synthetic construct
  misc_feature 1..32738: note = KRAS G12D genomic sequence
  source 1..32738: mol_type = other DNA
gattttcctaggcggcggccgcggcggcggaggcagcagcggcggcggcagtggcggcggcgaaggtggcggcggctcggccagtactcccggcccccgccatttcggactgggagcgagcgcggcgcaggcactgaaggcggcggcggggccagaggctcagcggctcccaggtgcgggagagaggtacggagcggaccacccctcctgggcccctgcccgggtcccgaccctctttgccggcgccgggcggggccggcggcgagtgaatgaattaggggtccccggaggggcgggtggggggcgcgggcgcggggtcggggcgggctgggtgagaggggtctgcaggggggaggcgcgcggacgcggcggcgcggggagtgaggaatgggcggtgcggggctgaggagggtgaggctggaggcggtcgccgctggtgctgcttcctggacggggaaccccttccttcctcctccccgagagccgcggctggaggcttctggggagaaactcgggccgggccggctgcccctcggagcggtggggtgcggtggaggttactcccgcggcgccccggcctcccctccccctctccccgctcccgcacctcttgcctccctttccagcactcggctgcctcggtccagccttccctgctgcatttggcatctctaggacgaaggtataaacttctccctcgagcgcaggctggacggatagtggtccttttccgtgtgtaggggatgtgtgagtaagaggggaggtcacgttttggaagagcataggaaagtgcttagagaccactgtttgaggttattgtgtttggaaaaaaatgcatctgcctccgagttcctgaatgctcccctcccccatgtatgggctgtgacattgctgtggccacaaaggaggaggtggaggtagagatggtggaagaacaggtggccaacaccctacacgtagagcctgtgacctacagtgaaaaggaaaaagttaatcccagatggtctgttttgcttggtcaagttaaacccgaagaaaacccgcagagcagaagcaaggctttttccttgctagttgagtgtagacagcaatagcaaaaatagtacttgaagtttaatttacctgttcttgtcctttcccctatttcttatgtattaccctcatcccctcgtctcttttatactaccctcattttgcagatgtgttctacatctcaagagttattacagtactccaaaacagcacttacatgattttttaaacttacagaggaattgtagcaatccaccagctaaccgcctgaaatagacttaaacatgtgcatctcctttttttttttttttttgagacacagtctcgctctgttgcccaggctggagtgcaatggcgcggtatcggctcactgaaacctccgcctcctgggttcaagcaattctcctgcctcagcctcccgagtagctgggactagtaggtgcacgccaccatgcccagctaatttttgtatttttagtagagacagagtttcatcatgttggtcaggatggtctccatctgctctgttgcccaggctggagtgcagtggcgccgtctcggctcactgcaacctctgcctcctgcattcaagcaattctcctgcctcagcctcccgaataactgggattacaggtgtctgctgccatgcccggctaattttttgtatttttagtagagacgggggtttcaccatgttggtcaggctggtctagaactcctgacctcgtgatctgcccgcctcggcctcccacagtggcatgtgcatcttatagctgaagtctaagccttcttaaatcttgagatccatcaaaacagacaggttttctaattgttatacaatgtatatgttatgtttataatagaaatcattttacaaataagttataaatgggaaaggtctatttgtaattatcagctcagaattaaccataaaactggtgtcactgaagtgactgaggtccaaaatgctgactctgcatgttatagactacagatatcaaatatggttgctaacaatagtttactttgagactgtagccatccacagtatatttgcttttaagagatggtagatggtaattcagttttatgaaaaataaaaatgaattttcttccattacaaaattgttggattcgagtccagtccactccttactagcttttctaactctcggtgagggatcccctcccagcccatgatcttcatttggtaagactcctttggaacccagttctctctagtggatttaaatgtgatttggttttaaaaatctcattcaaggaattttttttttttctggaaacaaccaccgcataaacaagtaaaccggaagatacatgtggctctgaattcatatatatacacaaactctaatccaatgtctgtccacagtatttcctaggctagtaaactttttggccttaacgacccctctaccctctttgtttttttgagagagagagtctcactctgtcacccaggccggaatgcagtggcgcgatctcggcccgctactacctccgactctcaggctcaagcgattctcccgcctcagcttcccgagtagccgggattacaggctcccgccaccgggctaattgtatttttagatacgggatttcaccatgttggccaggctggtctcgacctcctgacctcaggtgatccgcccgcctaagcctcccaaagtgctgggattacaggccaccacacccggcctacactcttaaaaattatcgaaggggccgggcacattggctcttatctgtaatcccagcactttgggagactgaggcgggaggatcgcttgaggccaggagttggagaccagcgtactcaacatagtgagaccttgttataaagaaaaaaaaaatccaggattaaaaaaaatctttgatttgtttgggatttattaatatttaccgtattggaaattaaaacaattttttaaaatgtattcatttaaaaataataagcccattacttggtaacatgaataaaatattttatgaaaaataactattttccaaaacaaaaccaaaacttagaaaagtggtattgtttcacacttcagtaaatctctttaatgatgtggcttaatagaagatatggattcttatatctgcatctgcattcaatctattatgatcacacatctggaaaacttgtgaaagaatgggagttaaaagggtaaaggacatcttaatgttattatgaaaacagttttgacctcttgcacaccagaaaagtcttagtaacctgaggggttcctagaccacattttgagaactgttttaggctatgcaaactggttggggggaggttggggtaggcagagagctagaagatacattttagtgtaattctcctcatctattcctaattgctttggcctacatttgaaataaagcgtggaggcaaacgggataagatacatgtttgtagtggttgttaacttcaccctagacaagcagccaataagtctaggtagagcagagtaaggcggggaactatgccgtgaccgtgtgtgatacaatttttctagcctgtggtgctttttgcggcagggcttaggagtaaggttagtatgttatcatttgggaaaccaaattattattttgggtcttcagtcaattatgatgctgtgtatatttagtgtttatctacaatatatgcacattcattaatttggagctactcatcctataataaatagttgtgcatttactcccatttttttctgcatttctctccttatttataattatgtgttacatgagggaaaggaggtgaaattaaacattcatattatttcaaaaaatttgaaacaactaactaaaaaatatgttttattttctgtatggtgtttgttatacaatctgtcaatattcatgcacctcttgggagacagtgtatgaaaagcaaagagtaacagtcacatggattactgattactgagatatattcacttgcatctttttttttttttgagacggagtggctctgtcgcccaggctggagtgcagtggcgtgatctcggctcactgcaagctccgcctcctgggttcacgccattcttctgcctcagcctcccaagtagctgggactacaggcgcccgccaccacgcccggctaatttttttatatttttagtagagacggggtttcaccgggttagccaggatggtcttgatctcctgacctcgtgatccaccctcctcggcctcccaaagtgctaggattataggcgtgagccaccgtgcccggctcacttgcatctcttaacagctgttttcttactaaaaacagtgtttatctctaatctttttgtttgtttgtttgttttgagatggagtcttactccgtcacccaatctggagtgcagtggcgtgatctgggctcactgcaacctctgcctcccgggttcaagtgattctccttcctcagcctccccagtagctaggactacaggagagcgccaccacgcctgattaatttttgtatttttagtagagagagggtttcaccatattggccaggctggtcttgaactcctggcctcaggtgatccacccgccttggcctctgaaagtgctgggattacaggcatgagccgccgcacccggctttctaatctttatctttttttgtgcagcggtgatacaggattatgtattgtactgaacagttaattcggagttctcttggtttttagctttattttccccagagatttttttttttttttttttttttgagacggagtcttgctctatcgccaggctggagtgcagtggcgccatctcggctcattgcaacctcggactcctattttccccagagatatttcacacattaaaatgtcgtcaaatattgttcttctttgcctcagtgtttaaatttttatttccccatgacacaatccagctttatttgacactcattctctcaactctcatctgattcttactgttaatatttatccaagagaactactgccatgatgctttaaaagtttttctgtagctgttgcatattgacttctaacacttagaggtgggggtccactaggaaaactgtaacaataagagtggagatagctgtcagcaacttttgtgagggtgtgctacagggtgtagagcactgtgaagtctctacatgagtgaagtcatgatatgatcctttgagagcctttagccgccgcagaacagcagtctggctatttagatagaacaacttgattttaagataaaagaactgtctatgtagcatttatgcatttttcttaagcgtcgatggaggagtttgtaaatgaagtacagttcattacgatacacgtctgcagtcaactggaattttcatgattgaattttgtaaggtattttgaaataatttttcatataaaggtgagtttgtattaaaaggtactggtggagtatttgatagtgtattaaccttatgtgtgacatgttctaatatagtcacattttcattatttttattataaggcctgctgaaaatgactgaatataaacttgtggtagttggagctgatggcgtaggcaagagtgccttgacgatacagctaattcagaatcattttgtggacgaatatgatccaacaatagaggtaaatcttgttttaatatgcatattactggtgcaggaccattctttgatacagataaaggtttctctgaccattttcatgagtacttattacaagataattatgctgaaagttaagttatctgaaatgtaccttgggtttcaagttatatgtaaccattaatatgggaactttactttccttgggagtatgtcagggtccatgatgttcactctctgtgcattttgattggaagtgtatttcagagtttcgtgagagggtagaaatttgtatcctatctggacctaaaagacaatctttttattgtaacttttatttttatgggtttcttggtattgtgacatcatatgtaaaggttagatttaattgtactagtgaaatataattgtttgatggttgatttttttaaacttcatcagcagtattttcctatcttcttctcaacattagagaacctacaactaccggataaattttacaaaatgaattatttgcctaaggtgtggtttatataaaggtactattaccaactttacctttgctttgttgtcatttttaaatttactcaaggaaatactaggatttaaaaaaaaattccttgagtaaatttaaattgttatcatgtttttgaggattattttcagatttttttagtttaatgaaaatttaccaaagtaaagaccagcagcagaatgataagtaaagacctgtaagacaccttgaaggtcatggagtagaacttccatcccaagcagatgaggatttatttaatctcaaagacctccaggaggggacattccccaactgtccttgttaactcattttcagaacatatttattagcatattttacatgtaatttggatcttcatgttaaatttaacatcagtggagatggaaaataagcatatcgccttgtctttgaaatagccctatattgttagattgtttcttaggcttctttaccctgggttaagcagtcctaatactttagcatttattctacatctagtgtactaatttaaaaaaatcagttctgaaaaatttctaagaactttcttcaagttccaagctgtgaaatctagaacaggtcaaagtgccttattaacgtactgtactgtgtagtgtcttgaagagacactttgcgctgaggcaagttctgagggcattgggtggccttgggaagatatttatgcagtttagaacctggagaattgattagataactaatcataaggaaacgtcacatatttttggtactataaaaaagtggagaaataatgcctatttgcaaagatttgatttaaacatagaaacaactttatttggcttccaattttaagaatttacagcagtaaaggggaacagtctaattgaagtagactgcctatgcaatagtctctgtatatttacttttgacaagttaattcaatgtgtactatagttttgtttctttgaagaggtttgaatagtgcacccattttaatctgtattgcaaattcagggttacttggcagactctactatttaaatcagatgtaaaaggaagttttaatataattcactttatgcctgaaagttttcctgggattttggaaggtgattttactggaaatgctgtctgtcttccctgaaaatctgagaaattccattacactttgtttccaatcagaggtcatgagtgctatatgagtatatacagcatgacgtcatgaatgtgataaagtgggttaggaaaccttttgctaatgattgttaaaatgcaatataaatgttgaagaaataaagctaacagttaagcctttatttgggcggaaggctgaaaaagtttataaacttaaacctataactctgcttatgatttctgccaaaccagaagacttgactctgggaagcattggttacctgtgaactttgaaactgacggtccctgacgtagtttagtcacctgggaaaaggtatctgagattatctcttatctcccaagttacagtgagtctctgagggaactgacacattacattaagttcttggtgtagttaaactgtaagaaaggcaggagaacttagtagttaaatagttggttaaatggaaatgctgactccatgttattgtaaaaagttaaaaatttaggaggatatggggatttcactgccattgcaggttttgattggtatttaccaatccgtgtgggtcagagagaaaattagaaaggatatgactgcacattttggaattattagcagtttttctacatttaaaatggaaataaattttttaaaaatttaaatcaagtaatactgtattttttggtgatttagatttttcaaaatttacactaagagatagtaaggagggtggctattgtttctttcaataatgtctctgagaggttgtaactcatctaaggatacgtagctaataagtggtaggatttcaatttaaattctctgagaccaagttaagtagaatttgcactgtactcttgtataactttttaaaactgaaaattagctatctttcaaattaagaaaatatttactaatggagactaattcagatttgtaagtataccaaaatttgaacttagcctgctatctaatggcaacttagtggcagaggtatgatgtaaaatcattcaggtatgacacatagatggagtatgtttgtattcgaggctgtgcacataatcacctttacttgtattgtgaagtatatattgttatcttttatgaagcccactaaagagataatgaaatacctcgttattagggcaagattattgaaaactcaaaatagcccccaaacacaatacttggctagaaatatatacctttatagttcagagatcatttattatcaaaaccctgaagttttttttctaaggtaaaatttggtggaagaggaaaagtctcgttttaaaaaaatgtaggtagttacagagatcagaatgattagttgatcacttaccaaatatatattaagtatctactgtatataatatgctagtaagaataaatatagcaggaagtattttttcccaggctctaattgtttgacatcagcatgcttttattgtggcacttataattcagttcaagtattatgcccctctttgatggaacagtttcctattcagtaaggaagaccagattaatcattggattggtttgtttcatctttagtgttctgagctgtagagtatttatttaccaaggtttattttaatttttattttatttttatttttccatgttcattgtagaattcattttacctacgaatgaagtatgtagattatagagagaaaatttgtaaaattaaactgatactgaagactggtataagaaaagccttatgtaatttgtaagctgctattcttctgagtttatacatatatctttagtaatcaatgagggatggttgggtgactgccctccaggggacatttggcaacatctggagatgtttttggttgccacaacttggggagagagtactgctactggcatctattgagtagatgctattactttaaatggcaaagctgcagttacctttgcaccaacctaatattaaacttcctgcagtgcacgggaaagcccccacaacagggttatctgaccccaaacctcaatggtgttaagatccaaaccttgatatgttaacctgtagctttaaacatcctttaaattgtcaaattcatgtccctgacataaggtttatgttagattttcaagtataacaaagatttaaactttaacttttgtacgttaatgatatgttagcttactccagtcttctattaaaacattctgtttttaaaatcagagacacacagcaattttataaatcatttctcttcaaggctgtgaagctctccccacttttgtgagtgccctctactggtcaaattatttgctttataacaagtaacagtgaaatcctaagtttgtgtagtttcgctgtttaaattatgggtggcatcaatttataaatatattcgttttatttaaaagtcttatatgattgatttcgtatcatttttgctctctgctaatattaatataaagattactgtctgtattagttaggcctaactaagtaggtgagtatagtgaactaagaaaggaaacgaggcagtatataagaaaatagggtggttcagttgttaacacttactgagcttactttgttgaagggactaaaaggcagcagtgtggctctctgagcttctttgcatgcactcaggagctgcttaatggagtccaaggcttggtggtgtgttacaggggatgataggagggtcctattcagaagtggcaaattgtgaaagtgcacattttgtagagttttataggactgtagaatagttgtgagcacctgatttttagaataaacagaaaactcaggtactgtatttaggtcaaattaagaataagtatttattaagacctgaatataaaactttactggtcatggtttttttctaccttgggtttttataaatccaaagatttaaaaacatacaaatggaagttggtaatggaattaagtgaaaggaaaaaatgattttatggtttggaatctcctaagattctggttttaacaatacaactaattccttaatcctagaaatgttcttcactgcccactttgtaccatgcagtcttcctgtgggctagagatacactgaggcgcaaaacagaccagattcctgccttcatggagcttattagttttaggtatctctagatttcttgtaatacctattacaatgcctgcacatcagttcattcatgtgggttcaacgtagtactcagtacatggcaaattcaagttttacttttcggaacttcatggatttttttcctcagaatatcttttatccataattggttgaatctgtagatgcagtacccatggatatggatggcccactttattttgaagagcagtgtttctaggcaatcatgctaattatatatgacttaatttagaggctttatacttaagagcattacatttctggcgtctcttaaccattattatttcataatgtgtaggttatggaacagttaaattattgggatcttaatatagaaattagtagaaataagccagatatggtggctcatgcctgtaatcttagcactttgggaggctgaggctattcgctgtactattttttactacttttctataggtttgaaattttttcaaaataaaacattgaaaaaagtaaggtaggtagtgtgtccctccttaatcctttcaaatattttattttcactatttctattaatttttttttttgtttttgagatggagtctcgctctgttgcccaggctggagtgcagtggcgcgatcttggctcactgcagcctccacctcctgggttccagccattctcctgcctcagcctcctgggtagctggtattacaggcatgcaccaccacacccaattactttttgtatttttagtagagacggggtttcaccatgttggccaggctagtctcgaactcctgacctcgtgatctgcccgcctcagcagtgtcactgcttctagaccgttttcaaggcacagagcttagaaatgcatgttactaagaaatcaagagttaactatttttcaccttctttctcccgcagtgagaaccctggttctaccctgtttctccttgtgtaaattttaatgctaaactatacacttgtgaaataaaaatgataatgtcattcttaaattatggatcttgcagtgttatctaagtaacatagattgagtgatttaactttaggtttccttatttgtggaatttggataaatatttttcacccttgagaaaagtgagactcctttctcatcatcagagtatccttaaaccattaaggcaaacatttgggaaaaaactgagctatctggctgcataaaaattaagttttctttaacaaagatagaagacaaatgaaaacctagaaaaaccatttggttcaagtaacaggaagctatcttatatatgaattagagaaaagcaaacacacaaatagaaaaaaagggatggggggtactaaagatataaatagcttgtctaccaaaaaagaaataaaataaataacatgaacatataaaaagacacttacttcatgaatgtgatgcaagttcaaacaataaataacatttctgtactttcatattggctaaggttaaaatgataactgctaggaagggtatggagaagtgtgcgccttgcactgtagtgggagtatagaccctcagactttatggaggtcagtctggaaatatgtttcaaaatgtaaactacatgtcctttgaccaggtaattcaacttcttgaaatttatccaaggatttaattggataaatgtttaagatgtatatataagaatgtttactgcagtgttgtttatgattttaaaaaaatggaaatcatcttcatgtctaccaatagagaatgggtgaataaattatggtatgtccatatatacaaattacatagttgttggaaatattaggtagatttagatatactgatgttcaaaaatgtccattatgtaagtgaagctgggtcacagcaccttgtgttgagtatgatttcatctagaaacaaaattactccctcatcctttgttgtgttttagttttttaaaataagcttataccattgggctgggggaaaagtaaatactcgttttggagagagaaaagggcactaaagtttcagataccgttagattatttcatgcttatttttcaagcctcaataaattacataattcacatgtagtcttggattaaggaaattgctattaaggctaaataaataatatgagaggtatataatataaaatatgaacattatattggcattaagattggatccacggtcattccagcctctcattcttacctggacttcaagtgatcacttgtgggcaaatgccatctgacttgaacaggttacacatgtatgctcattatatcgttattttcaaaatttgtcatataaattttccttgagttcattcagatttttgaactagttttttctcttgggagtagtacacacttaattctctctagtactaagctaatgttcaccattcttataattttaagtatccagcatttagtaaagaagtctttgttttctttatccttacttttagtgaatgtcttagtttttaattgaaaattctgccatgaaaataagctctttaacatcttcactccctaatcaaaacagaaatccttcatagccttcagttgtagctatccttccctgtgatttgtccagctccattatatttattttgaaatatggtgaccagttttgcaaaattatttcaactgtaggtgcccagtgattttgtaaggagaagatactgtttctgaacagttctcagtagccagtggcctgcccctactttttggcctgcgtgtagtatataaaataatgcagttaactttttatagcacttttcattttataaagagattttcatggtctttaatattaatctatgtataaagtcctgtatgcagttttacctactttcacagctgaaggaacaatagcttagagaagatgtgagataaagtagtttgcccaagcccatagcacaaataagtgaagttcttcggctgtccatggatcgaagactcccaagtctatctctagcctggacttctgtcctgagcaccagacatgtatgtatatcaagatgcctgcaggtcatatccaccaggacaacccatgagtacagggaattcaacatgcccaatatcactcatcttttccttcgccctcccctttgtactcatcccctgtcggtaagctctgttattttaaaaaattgaaatgtattcacatagcatacaatttacacttttcaagtgtacatggtttttagtatattcacaagggttgtgcagtcattactactaattccagaatgttattatcaccccaaaagtcccacatccattagcagccactccccaatcccttctcccaccagcctctaaaaactgctaatttttccatctctgtggatttgtccactctgattatttcatataaagagaatcgtacagacgtggccttttgtgtctggcatcctccacacaggatgatattttcagagttcgtctatgtttttgcttgttgatcattccttcattcctttttctggctgaataatactctgttatatggatataccttattttgtttatctgttcatttgatgggcatttgagtgatttcctctttttggcaattttgaataatgccactataaacatttatgtacacgtttttgtgtgaccatatgttttcacttctctcgggtgtatatctaaggtacagttgctgggttatatggtagctctgtctttgactttttgaggaactgccaagtggttttggtagtgattgtactgtttacattcctaccaacaattttacctaagtatttctcaaatctatttaatcttttcggtccatactgctgttgctgccttagttcagattttgtcatttcttgtaataattcgtagctcatctcccagtctctgctcccctctctccctccctcccccttcttctctctcttatttccacccatttttaacatttatagaagtcaaaagtctagttcagaaagcagaaaccatactagatatttcagcacagagaactaattaggtgttggaagactgaaaggcaaaaaaacactgaagtaacacagtaacatcaagaatgggcactactcctaagattcagggaatgctgggaagatttggggtttatcagaactggaagctcagaggaggggccccttgtcgctgaggcttaatccctgcagaggtgcctttggctgctactggtgaatctgagtgggtatgatgagtcagtgtctgggaagggccaaaacattttgtccctttctataatttgtcatgataatgctagtaatgaatctgatctcccttcctattttaaaaaccttttagtgattttgtataggatgaagtttaaaactccttacttaatatacacatgaccctccgtaagctggcccctgcttgattgtccagtttcacttcttggtgcttattctaaggcctctaagccttagagatcctctaagcctttgagatccccaaaccctggactgcggactggtacccacctgtgtggcctgtgaggaactgggctgcacagccggaaggaggtgagcattacttgccttagctcctgtcagatcggcagcattagattctaataggagcgtgaaccgtgttgtgaactgcccatgcaaggatctaggttgcatactccttaggagaatctaactaatgcttgatggtctgaggtgaaacagtttcatcctgaaatcacccccaactcggtccttggaaaaattgtcttccacgaaactggtccctgatgccggaaaagttggggaccgctgttctaagctaaagttatatggagctccttggttctgtgtcctcaacatgctgttctatgttttttacattctgtttgctccttcctgcttggaatgtccttcccctccccgtctttcttaatgcatacaaagttgatctctcctgtgtgccaccattgtacttcgtcttgcatatggtgttacattcattttattttaattatttatttacgttcatgtctcttccactcaccttagttgcttgaggtcagaaactatataatgtgtgacacggaatgtgacacctagattttcaataagtgtttctatgatacaagggagactgatgtgggtagatgggaatgaactcatcaacctctgtttacataccctaaattccctgtttcttccctattataattctgacagtctacaaccgtctttgatggcttataaacggaaagtgcggaacacatcattctacagtgaatttaaataacctttcggaagagtaacgtaaagtacttgagcattaattgagtaaaagtttctcatcttttcctacaggtgttattaagcagtatgtaaaaagtccttacaatacttaatacattaagaaaacatacaatttcaagaggaaatccccgagtaatacattattgacattttcagcagttctagttatattgagaagagcatctcatggaattggcagaatgaagatggagattaaatgagatgatgtttgtaatatgcttatgacagtatctggcatataagtaagggctcagtaaatgttgactgctgtaattactattaatagtaatatgattacctttagtaaaagttattagtttctttaggttttttgtttactacaatatagtaaacaaaatctatacttggaatgtatatattgttttgttttgatacatggaatatgtctctgtgtcagagtcactgcctgagttggaaaacccatactcgagtatgttaaaaggtgaacacactgaataatttagttattaattataatggaaaaatgacaaacttgatgttctggttaatgaggttatcttatcttgaatgagttagcttttaaattcctcaaaataaaggcatttaataaaccaggaaacacttcattaaaaaaattatgcaagtcagtgtaaaagaagattaaaattccacatgggcaaaggacacacgttggcgataaatatgcagataagaaaaaaaacctatataacattattactcctcaaagaaattggtatgaaaacaataaaaatgtgtagcttatcaaaccaacaaaaatttaaaaatatgaaatccattttaagtaatgataaaatgggtgcactcttagtgctttatagaatagtagtataatgaacctcatgtgtgtaccaaccagctctttcatatcttaacatttagcaacatttgatttagctctttcttttttccaagatagaaaagttaatattgttgaagactcctgcattcttttccctagtcttattttcttccctcccataaatgtgttaaaatctctgtgtgtattgttttggttgtatttttacataaaactttacatattatataaaatttaattgaaggtaaaatttattaaattattcttaatatatattgtaatttaaaaattaacagcttcattgtcttgataaaatttatggtatcttaaacatgtgcttgtttttctaagagaacattgaaacatagattttaaaacaaattgttgaaagattaaaaaatctgcctttgcacactgttacattgaaagtggggcatttgtcgtgaacattcatttcaaatatgtagtatcttcagaatatttgagaaggatttgtattatataattgaaaaatctgttaaattgtatttatgttaactgcttaattctaataaaatttccattcattttttagtatctgcatatatttacatcaaatggattcattcacttatttaagaggcagtactaattacctatagcgttcaagactgttaggtagagggtgtgtagtggtgagtacaacaggcgtgagccctaccaacacggagtttaaagcctagtagaggatatagacttaaacaatttcacaagtaaatacataattacaaattataatacatgctatgaaggaaacataggaggtaccagagaaggaagagtgctttgcatttttatttttaagaccgaagagtgctattggaggactttgagcaagtgaatgacatgatctaacctaccttcgttcattcattcattcattcattttcttccttcctggctcaagcagtcctcccacctgagctccccaaatagctgggactacaggtacacactaccacacctaatttttttttgtattttttgtatttttgatgggattttaccatgttggccaggctggtcttgaactcttgacctcaggtgatccacctgtctcggcctcccaaggtgttgggattataggtgcctagcccatggtgcctagccctaacctacatttataaactatcacttgctgctgtgtggagactatattgtgagattaacagcagggatacctgctaggaagcaattgctgcagattgcctgagacaaaatagttatcatggactagggggatggtggtggtggtggtggtaggtggttggatgtaggatatattttgaagataggtaaatggtgcaagattatgggtcagttttaaatgcttaagtaaattttctttgtaagacattttaggatgccatgttaagaatctctttataactgtcatttaaaaaaaaaccacatattttcttagcataatttcccatagtaacattactatgtcaaaggctatgaacatttgaatgactttagataaatactgtaattgctttccaaaaatattgtgcttattatgtcaccagaaatgtttgaattctgtctacaattcagtcttgccagtatagtacatttcatttagaaaaattttttactatgtagatggaaaaaataatattttagctgggagtggggggactatggggaataactttccttcatttaatattttattgtgagttagtttaagttactttattttatcgtagtttcctaaggctacaaattagtaaccttggtaacttatgtacctaatttaaaagtttacttttttgaaaggctggaaatactaattaaaaacgtaacaccttcatccttgtctttgctccattattaactagtttcattacagaatctctgtgttttaaaatcagatgggttttcataaccagtactttctcagagtggtaaatttaaaaaaatatataaagagaataaataatatttgttgagaatacttcaaataatgtgaagagttattaacttacagcaggagttggcaaacttttctataaagggccatatgggtctttgtcacaaagtcttgggtttttgtttttgtttttttaaacagctatttaactattcctagctaatgggcaatacaaaaacagtgggcaagatttggcctgtgggcagtagcttgctgaaaccttatttagactctaaattttttgaaagagtctacattgatgcatatttttttttcttcctccaaatacagttgacccttgaacaacatgcgtttgagtgaccatgggtccacttgtgatacacgtttttttcccaaccaaatgcagatatggagggctgacttttcatatacctggatgttcctgggccaactgtaggactagaggctgggggggtcttggaaccaatgccgtgtgtataccagggatgactgtttcttatggcctgacctgaagttggaacagaatctttattaatatataatttttgttgcgtttgttttctctttatatttatccattctttttagatcgtatttcatttaacactttttcttctttagtttttaccaagttgcactgaaaatagctcagtgactaattgcacttctaagagtgaggaccctagttaaaattaactctaaaaatactgaatttttaacctaaaccttttatttctaatcaacagtattatttatgagtaggttatagattactttgaaacggaatgtgtctcagaactttgctatcgatatttttaaggtctggtagggaaaagataataggaatgagatttatcagtgaataggggactgctttcccagtttctcggtcgcactggtgtattcaccatggaagcatcttatgaaatatgtacataaactactaatatcccacattacaggttgactattctttatctgaaatgcttaggacctagaagtatttttggattttggtttttcagagtagggatactcagcctacattggtaagtaaagaatgtgaggtgacaggctgggcgcgatggttgacgcctgtaatcccagcactttgggaggccgaggcggatcacctgaggtcaggagttgaagaccagcctggccaatctgtactaaaaatacaaaaattagctggacacagtggcacgtgccagtagtcccagctactcaggaggctgaggtaggagaatcgcttgaacctgggaggcggaggttgcagtgactcgagatcgtgtcactgccctccagcctaggcaacagagcaagactccatctcaaaaaaaaaaaaaaaaaaaaaaaaaaagaatgtgaggtggcagcaataggtaggaagagtctttggtcagctttacatgctctgtagccatgcctgggtaatgggttgactctaagactctgtgctttgctcccacctcctgctttttcattactctttagaatggtttttaatttgtgatctataggagttctttcaagtatttaataagagaataggctaaattaagtaaatgtcaactgaatgctcaaatctctactaaagagcctcttatttagaaaataaatatccatcttttttttctgactggtgagataattaatttttattacagatggtttggaaaataccatatgctttaaaagataagcacaaaattatagtctaatatgtaggttttcatactttaaaaaattgaaaaccaaagaaaaacatttaacatagcatctagtacaaagaaaagagataagcaagagataaatgtcttttttgggacagagttttgctgttgttgcccaggctggagtgcaatggcacaatctcagctcaccgtaacctccacctcccgggttcaagtgattctcctgcctcagcctcccgagtagctgggattacagtcatgcaccaccaggcccaggtaattttgtatgtttagtagagatggggtttctccgtgttggtcaggctgatctcaaactcccgacctcaggtgatctgcccaccttggcctcccaaagtgctgggattacagacatgagccatcgcacccggccaagataaatgtcttttaaattatctccattaaagacataacctttataacattttgatgtatatattaccagtttttaaacacatagtagatttgtataaatacataaacacatattattgtgatcatgctgcacttagacatctttatattctccttatactgtaaacattttgaaatactttactaacaacatttgtaatgaccattctttctctctttctccctctgatagaatggtctacagagtaattcataaactaaacatactttagaggctgggcgcagtggctcatgcctgtaatcccagcactttgagaggctgaggcgtgcagatcacgaggtcaggagttagagaccagcctgactaacatggtgaaaccccatctctactaaaaaaacagtacaaaaattagccgggcgtggtggcgtgcacctagaatcccagctactcaagaggctgaggcaggagaatcactcgagcccaggaggcagaggttgtagtgagccgagattgcaccacagcactccagcctgggcgacagagcgagactccatctcaaaaaaaaaaaaaaaagatacattaatactatagcctacatgtggaacattaagaaaataattgcttttatgtttatgctttatacctgttgttagccctgcttcttatttcatgatttcatggcttcacattgtaacatccctttaccatattttttgaggactgttttggcagaatgtgtgaaatcttgagcagaagtattacccaaaagtcagaagaaaatcagatttttatttcaagattctgttaaagttacccactcccttcttttacttaatcttatagttgcagttctctctctttttagaaaagaaaaaagaggcccctcaggatttgcagatgaaacaatattgctctttagagatatccatctggctgttagattatttttccacagttttcagaagtggatgaggccattagaatcttgagtattgcccatttccttatgtgtgcctttgactatagataaaatagatgcatgacaattatttataagttgattgatttttcttgtcatttaaatcatcttgaataatagagttggtagagctatcccatttttgaaattattttgttttgtcaataactttttgttaccagcatgtacacttgcattgttgactctccatataatacctttaaaaaatttttttttgtggtaaaatatgcataacataaagtttaccatggtagttttctttcatttgttttgtttttgtttttttgagacggagccttgctctgttgccaggctggagtgcagtggagcgatcttggctcactgcaacctccgcctcccgggttcaagcaattcccctgcctcagcctcctgagtagctgggactacaggcgcccgccaccacgcccggctaatattttgtattttaatagagatggggtttcaccatgttggccaggatgttcttgatctcctgacctcatgatccgcccacctcggcctcccaaagtgttgggattgcaagtgtgagccaccgcgcctagaccatggtagttaattttaagtgttcaattcagtgaccttaagtgtgttcataatgttgtgcaaccatcaccatgttgtctaaccattagcactatctgttttgagaacttttttttatcatcccaaattagaattctgtacctgtcaaatagtccccagtaatcctccctcccccagcccctggtaatctgtagtctacttttcgtctttttgaatttgcctattttaggttcctcatataagtggaattatgtggtatttgtccttttgtgttggcttacttcatttagcataatgttttcaaggttcatctgtgttgtagcatgtatatacaggttgaagcatccgttatccaaaatggttgtgaccagaagtggtttggatttcagattttttttttggattttggaatattcatagatacttaactggttcagcatccctcgtccaaaaatccaaaatcagatggagctcagtggctcatgcttgtaatcccaacacgttgggtggccaaggcaggaggatcgcttgagcccaggagttcaaccagcctgagcaacacaagaccctatctctccaaaaaaaaaaaaaaaaaaaaaaagatgaaagaaaaaaaaatccaaaatcaaatgctccagtgagcatttccttttagcatcatgtcaggctctaaaagttacaggttttggagcattttggatttcagatttttggattaacctgcattaatgctcaacctatatgaaattttattcctttttatggctgaataatgttccactgtatgtatatactacattttgtttatccattcatctgttaacagacacttaagttatttccacattttgggtattataaatagtgctgctgcgaacattggtgtacatgtatctgtttgagtccctgtttttagttattttggttatatacctaggaatggaattgctgatcatatggtaattctgtgtttaactttttgaggaactaccactgttttccacaatggcatcaccattttacattcccaccagcaatgcacaaagatttcagtgtctgtatccttgctaacacttattttccattttttgagtttttttgttttgtttttttaataatagccaatcctaatgggtatgtggtagcatctcatggttttgattttattttcctgactattgatgatgttgagcatcttttcaggtgcttagtggccatttgtccgtcatctttggagcaggaacaatgtcttttcaagtcctttgcccatttttaaattgaattttttgttgttgagttgtatataacaccttttttgaagtaaaaggtgcactgtaataatccagactgtgtttctcccttctcaggattcctacaggaagcaagtagtaattgatggagaaacctgtctcttggatattctcgacacagcaggtcaagaggagtacagtgcaatgagggaccagtacatgaggactggggagggctttctttgtgtatttgccataaataatactaaatcatttgaagatattcaccattataggtgggtttaaattgaatataataagctgacattaaggagtaattatagtttttattttttgagtctttgctaatgccatgcatataatatttaataaaaatttttaaataatgtttatgaggtaggtaatatccctgttttataaatgaagttcttgggggattagagcagtggagtaacttgctccagactgcatcggtagtggtggtgctgggattgaaacctaggcctgtttgactccacagccttctgtactcttgactattctacaaaagcaagactttaaactttttagatacatcattaaaaaagaaaaccataaaaaagaatatgaaaagatgatttgagatggtgtcactttaacagtcttaaaagcaatcgtgtgtatagcatagaattgcttggattggataaacagtggcattatatattttaaaaaataaaagttttgaaagattgaagaatttgggcattacagttctcttaaatctgacaaagctgcataaaactattaaaataatcattattatactattttatattctatttctttgagggtttagttttccaaaaactacatattaagcaaatgaatcactcagtggctatgtcatataataacgagttagcctagttataagaagtttaacattttatttaagaacattgttacagcatgtttactgtatagtctagtaatagaggaaaagacatttgggtgggtggtagtggtagtatttttatagaggagttaccaaatttcagctctattatccaagtttacccagctaatggtgttcggaaccgggaatttgagccaattctgactctgttgtctgctctgctccttcttttgtgctgtgtctttgaaagtcacctaaaattgtgagggaatgtaatttcaccccaaatttagagtttatgcacttgttatattgaaaatgattaacatgtagaagggcttttaatggaataagtggtgtagtaacttcagtgttgcctacctagaaatcaaaatctttctagttgtccactttgttttttgaaaaagtaatatgaaaattatgttaatgctttaattcaggtttttgtaaaatattttttatctttacacatttaacatacgtttctaaaattatagtctgttatatagcactttgggtctagaatttttcagtagtttctgttttactattatgatctacctgcatattaacctattaggttatagttttactatacttctaggtatttgatcttttgagagagatacaaggtttctgtttaaaaaggtaaagaaacaaaataactagtagaagaaggaaggaaaatttggtgtagtggaaactaggaattacattgttttctttcagccaaattttatgacaaaagttgtggacaggttttgaaagatatttgtgttactaatgactgtgctataacttttttttctttcccagagaacaaattaaaagagttaaggactctgaagatgtacctatggtcctagtaggaaataaatgtgatttgccttctagaacagtagacacaaaacaggctcaggacttagcaagaagttatggaattccttttattgaaacatcagcaaagacaagacaggtaagtaacactgaaataaatacagatctgttttctgcaaaatcataactgttatgtcatttaatatatcagtttttctctcaattatgctatactaggaaataaaacaatatttagtaaatgtttttgtctcttgagagggcattgcttcttaatccagtgtccatggtactgcttttggctttggtttctttctacattgaaaatttctcttcaattctgagcacatgttaacatttagaattcaagaggtggggatttttttttcccatggttacatatatatatatatatatatatatatatatatatatatatatatatataaagaacagggcaacaaatttttgcgttttctatttcggtagtacttttaaaccattatgtcatgtttctaggttaaacgttgttgtatttgaagaattttactttggcagaatttttttgaggatgtgtttatttctggagaaaggtctcattaaagaaagacaatacccagaaagccaacagaaattctgttactcatttaatgcatttttctgacaaaaattattgccagagagaacctgaattttgtttcaaaaatcatctttgttttaaaaatgactttttcttcaggtaaaataaaataatttcagttgctattatttaacctgtttgtatgaagagtttaacatataggaaatgaatacataaagataggaaggaattaattgttatatgtagtcatatgtctcttaatgacagggatactttctaagaaatacattgttaggtgattttgtcattgtgcaaacatcatagaatatacttacacaaaccttggtagtataacctactatacacctgggatatgtagtatagtctcttgccccagggatacaaacctgtacagtatgtaactgtactaatgactataaggcaattgttaacacaatggtaagttttgtgtgtctaaacctacacttgggctaccctaagtttatatatttttttaaatttctgttcaataataaattaaccttactttactgtaactttttaaactttttaatttttcctaacattttgacttttgtaatacagcttaaaacacacattatacagctatacaaatttttctttccttatatctttattctgtaagcttttttccatatttaaaattttttgtttgtttttacttattaaacttttttgttaaaaactaagacatgcatgcacattaacctaggcctacacagggtcaggaccatcaatatcattgtcttccacttccacatcttgtcccactggaagatcttcaggggcagtaacacacgtggagctgtcatctcctataataacattgccttcttttggaatacctcctgaaggacctatccaaggctgtttatagttaacttttttttttttttttttttttttttagtaaataggaggagtacactataaaataacaatataggtgctataccattatacaactgacagtgcagtaggtttgtttacaccagcatcaccacaaacacgtgagcaatgtgtcgtactacagtgttaggatggctataacatcactaagcaataggaacttttaaactccattataatcttatgggaccactatcacatatgcaatctcctgtggaccaaaatgtcattatgtggtacatgactgtactaagaaattgatccatctatattccatcaatttgtttagggctttttctggttacatttacctgtgagcccagaaaaccagttttgtagaaattaacttctgtaatgctaggagttaaaaaaaattgctgaacaacttttacattgttaaacatttaaaaacaagcgttctagaagtttatcaaatttcataaaggtgcaaaaatgtaaatgtaaatcattatccagctaatatatatgttgtatttccctagtaggagagcatatgtacctcttcctagttatacaaatttgatatatagtaaagaaacagtaaattctacttcaagtcattttgggaggattaaaaactgaatttctctagtttgaccattgtacagatttatctggcaattttactaaaacctgatttataggttaaacttggtgtatatcatatatcactttactttagaggaattaagatttcacataaatccatttccaggttccaaagaccaggaagaggcttggtttttgtttttctttttactgtctttacagtctccttgacttttcttaggagagaaggtactgagaaaacatgattctaatatttattattttttcttccaacattttcttatgaaacattttcaaatacaaaattgagttttatttaaaacatttgcaaatatactacctagattctaccattgttgttttatatttgctttacttacaacttttaaaagatgctttttataccactgaacattttagcttacatttcacaaagaaaagaaaaaatttaagagactttgcataatgttttaaggggttgcagtaaagaagtgcttcttatattttcttatgcatacaaatcagctgggcttattaaaatccagattctaattcagaaggtttaggtggggaccgagtctgcatttctaacaaactcctaggtggtatttttcttggtacttggaccatactttgagtagaaaagcagtagaggacataaaaagagtcttgttagtcccactttgttgctgtccacttctcatttgataatatcctaaaatagctgtgtctcctttttggtggttgtatgattactacctcagaagtactaattgattcttgctatttgaccttaatactttaatataacacagcattcatatttgatcagaaaactatctggcttccttttataagagatttttaggttttatacagttttgtggccttgggtttttttgtttgatttgtttttttgaaggtatataatatgtaagtagataaacaaatttgatttgtagacatttttatgtggatcatctaattaaaaatggagggatacagtatgaaagaatacttgtacttcttaacagagcactcaacctttcttttacatcctgtttcactgatgttattatgtaatttatgttgctaaactataaattagatatttaatttctgttctttgatttccttttattattaaatggacttgttgatttgcctagaaattaatttgcctttcaaaagtcttattaatcttcctccgttgaaattaatttgatatttgcatgcttctggaagactttaaagagctattccgagtaactgtagagattataaaatgaaatatgggaattttaataaattttacatctccagttactggtgaaaatgtcaagtcctcctttctgcagagtattttgttactcatctgttattcagcttatttatttatttatttatttatttatttttctttctttcttgttttttttttttgagacggagtcttgctttgtcgcccaggctggagtacagtggtgggatcttggctcactgcaggctccgcctcccgggttcacaccattcttctgcctcagcctcccaagtagctgggactacaggcacccgccaccatgccttgctaaatttttgtatttttagtagagacgggtttcactgtgttagccaggatggtctcgatctcttgacctcgtgatccacctgcctcggcctcccaaagtgctgggattacaggcatgagccaccgcgcctggcccttatttgttttttaaacaaaattagtgtgcatatccttgttgtattttatcggcaagttgttttatgccctaacttttggggtcttgatcatgagcctaaaacacgtaaacacccaaaaagaattatattccggttaaaggaacaaaacattcatttagaagttctcatccatgtaaatcagaggctggcaaatattttctgtaaagggccaagatagtaaatgttttaggctttgagggccacaagtggtatctgttgcatttttttttaattatgaccctttaaaatgcaaaaatcgttgttagcttgtgcatagtataaaaataggctggccgcatgctgtggctcatgcctgtaatcccagaaatgaggtgggaagccgaggtgggcacaccacctgaggtcaggagttcgaggccagcctggccaacgtggttgaaaccccgtctctactaaaaatacaaaacttagccaggcgtggtggcgggtgcctgttatcctggctactcaaggggctgaggcagtagaattgcttgaacctgagaggcagaggctgtagtgagcccagatcaagccagtgcacaccagcctggacgaccgagcgagactctgtctcaaaaaaaaaaaaaaaaggctgtggctgcatttggtccattggctgtaatatgctgattcctaattctctgggtaactttagtgtttgattagctactagaagttaggttaaacttttgtattttacaggctaactttaataatcttaaagtaaaacttaacatagttcatggaaaggaaatagaaattttaccctagtactcttttttttttttttttttttttttgaggcagagtctccctctgtcacccaggctggagtgcagtggtgggatcttggctgattgcaacctcctcctcctgggttcaagcaattcttgtgcctcagcctcccgagcagctgggactacaggcacgcaccaccacacctgactgatttttgtatttttagtagagacagggtttcgccatgttggccaggctggtcttgaactcctggcatcaagtgatcctcccatctgagcctcccagtgtgctgggattacagacgtgagtcactgtgcctggtctctagtattttttttttttttgagacggtctcactgttgccaggctggagtgcagtggcgcgatcctggctcactgcaacctccgcttcccggattcaagcgattttcctgcctcagcctcctgagtagctgggactatgggtgcacaccaccacgcccagctaatttttgtatttttagtagagacggggtttcaccatgttggccaatatggtctcaatctcttgacctcgtgatctgcccgtctcggcctcccaaagtgctgggattacaggcgtgagccactgtgcccagctgtactttttaagataagaattgcagggtatatatttttaccaacttaataacttataattttaaaaagctaattacttggctagaatataatgcgttacatattctttacactcagttcagtccatatctgaaaggcaaatagaattattttctgctagtacattgtgtagtccctatgttcctagtgtataaggactgttacctagttcacatttatctgggttgttgacagattttcctggtccctttggacagtgcatggccatgttggcaaaagctgtcaaaattgaaacattgacaccatgagaattgtgtgttttccagtctgctaaaatcaaaagtgggagggttcagtaaggtgaataacagaagcagagttttcggggtatctgttactcctcattcggcttttctgctctctgggggtctcaatttaaatataatgtgaaaattagttttacgaacctaaaaatgttgagtgattcatttcctggttttgttgttaatttctagatatttaaattaattgttagaagaaccccgttaaagaatgctttgcaaaacaacctccttatgtgctatgtctctgtttaatagtagttgagtttgtgtacatgagatcaatattttgaactatagctttttatgagttaaaaattgacggaacagttactgtgcacttgctgtgcaccatggtagtctcccaagtagtggtttttctgcatttcaatagtacatgagataggctgtgggtggcaaggtttcttgagaaagtgagggatgcacagttgggttttagaatacatcttgttcctccatgcccttccccaccaaaaggctggtagtcttgcatttgtatatagttagggtatttgatgtgttgcttccttgacagagttttgcaagaatttgcagatttaacaggaacaaaaacttacttaaaacaaaatctcttagtaaaagcatagtctagcaagatttagaatgatactttggctaacagtactttctctatatggagtgctttgtttccatagcctcacaagtatgttttcagataatagttgagttgaaaatgttgtcaatctcttgattttaaaaaatttacatatttaaagttgtatacttttgttcctacgtattttcagttgttcttaaagtttaataagtgacatttgaaaatgagtatatgtgtataaaaacaaaagtaggctaggcacggtggctcatgcctataatcctagcactttgggaggctgaggcaggcggatcacaaggtcaggagtttgagaccagcctgggcaatatggtgaaacccccctctactaaaaatacaaaaattagctgggtgtggtggtgcatgcctgtagtcccagctactcaggaggctgaggcaggagaatcgcttgaacccggaggtggcggttgcagtgagccgagattgcaccactgcagtccagcctgggcggcagagcgagactccatctcaaaaaaaaaaaacaaaaaaagaaaaagttaaaaaaaaacaaaaaacccccacaaaatgagtatatgtggcaacaagtcctattctcaaaaaaattattgtgtgctagttaagagcttaatgagtagccagtcggtattaaatatctgtttcagctatattttatctttaaaaattatctacagattttggaatgtgaaaaactagtgttttgtttcataggtatatactgtaggcattttaaaaataagagccagtgccagtggtttacagtgtacacaaggataatgttctcatgttctcttgatgtcagtatgactttaaagcatattatcaagaaataactaagtctgaaaaactgtggtaaataactggtactctaaaacctaagtttcttattactaaaaataagaaatggtaaaagtcaccctgtgctgttaattatatgagccactgaggtcctgacactgaattcttggtggtggataataatctcttctttttaattattggcttccaattctctctgcattgctggaaacaaaaatcatatatttcactattggtggtggggatgctgtcactgaaaaagtagacacattcatattgattttagaaataagttaaaatcaaaatttgcttctgctaaattagtagaggaccaatactgtttttctccttcatagtatgttttggtacttctacattgacattataacttttttttttttaaacagaaatagaagtttacattcttagaa

SEQ ID NO: 32 - protein, 188 aa, synthetic construct [sequence omitted]

SEQ ID NO: 33 - DNA, 5306 bp, synthetic construct
  misc_feature 1..5306: note = KRAS G12D mRNA
  source 1..5306: mol_type = other DNA
ctaggcggcggccgcggcggcggaggcagcagcggcggcggcagtggcggcggcgaaggtggcggcggctcggccagtactcccggcccccgccatttcggactgggagcgagcgcggcgcaggcactgaaggcggcggcggggccagaggctcagcggctcccaggtgcgggagagaggcctgctgaaaatgactgaatataaacttgtggtagttggagctgatggcgtaggcaagagtgccttgacgatacagctaattcagaatcattttgtggacgaatatgatccaacaatagaggattcctacaggaagcaagtagtaattgatggagaaacctgtctcttggatattctcgacacagcaggtcaagaggagtacagtgcaatgagggaccagtacatgaggactggggagggctttctttgtgtatttgccataaataatactaaatcatttgaagatattcaccattatagagaacaaattaaaagagttaaggactctgaagatgtacctatggtcctagtaggaaataaatgtgatttgccttctagaacagtagacacaaaacaggctcaggacttagcaagaagttatggaattccttttattgaaacatcagcaaagacaagacagggtgttgatgatgccttctatacattagttcgagaaattcgaaaacataaagaaaagatgagcaaagatggtaaaaagaagaaaaagaagtcaaagacaaagtgtgtaattatgtaaatacaatttgtacttttttcttaaggcatactagtacaagtggtaatttttgtacattacactaaattattagcatttgttttagcattacctaatttttttcctgctccatgcagactgttagcttttaccttaaatgcttattttaaaatgacagtggaagtttttttttcctctaagtgccagtattcccagagttttggtttttgaactagcaatgcctgtgaaaaagaaactgaatacctaagatttctgtcttggggcttttggtgcatgcagttgattacttcttatttttcttaccaattgtgaatgttggtgtgaaacaaattaatgaagcttttgaatcatccctattctgtgttttatctagtcacataaatggattaattactaatttcagttgagaccttctaattggtttttactgaaacattgagggaacacaaatttatgggcttcctgatgatgattcttctaggcatcatgtcctatagtttgtcatccctgatgaatgtaaagttacactgttcacaaaggttttgtctcctttccactgctattagtcatggtcactctccccaaaatattatattttttctataaaaagaaaaaaatggaaaaaaattacaaggcaatggaaactattataaggccatttccttttcacattagataaattactataaagactcctaatagcttttcctgttaaggcagacccagtatgaaatggggattattatagcaaccattttggggctatatttacatgctactaaatttttataataattgaaaagattttaacaagtataaaaaattctcataggaattaaatgtagtctccctgtgtcagactgctctttcatagtataactttaaatcttttcttcaacttgagtctttgaagatagttttaattctgcttgtgacattaaaagattatttgggccagttatagcttattaggtgttgaagagaccaaggttgcaaggccaggccctgtgtgaacctttgagctttcatagagagtttcacagcatggactgtgtccccacggtcatccagtgttgtcatgcattggttagtcaaaatggggagggactagggcagtttggatagctcaacaagatacaatctcactctgtggtggtcctgctgacaaatcaagagcattgcttttgtttcttaagaaaacaaactcttttttaaaaattacttttaaatattaactcaaaagttgagattttggggtggtggtgtgccaagacattaattttttttttaaacaatgaagtgaaaaagttttacaatctctaggtttggctagttctcttaacactggttaaattaacattgcataaacacttttcaagtctgatccatatttaataatgctttaaaataaaaataaaaacaatccttttgataaatttaaaatgttacttattttaaaataaatgaagtgagatggcatggtgaggtgaaagtatcactggactaggaagaaggtgacttaggttctagataggtgtcttttaggactctgattttgaggacatcacttactatccatttcttcatgttaaaagaagtcatctcaaactcttagttttttttttttacaactatgtaatttatattccatttacataaggatacacttatttgtcaagctcagcacaatctgtaaatttttaacctatgttacaccatcttcagtgccagtcttgggcaaaattgtgcaagaggtgaagtttatatttgaatatccattctcgttttaggactcttcttccatattagtgtcatcttgcctccctaccttccacatgccccatgacttgatgcagttttaatacttgtaattcccctaaccataagatttactgctgctgtggatatctccatgaagttttcccactgagtcacatcagaaatgccctacatcttatttcctcagggctcaagagaatctgacagataccataaagggatttgacctaatcactaattttcaggtggtggctgatgctttgaacatctctttgctgcccaatccattagcgacagtaggatttttcaaacctggtatgaatagacagaaccctatccagtggaaggagaatttaataaagatagtgctgaaagaattccttaggtaatctataactaggactactcctggtaacagtaatacattccattgttttagtaaccagaaatcttcatgcaatgaaaaatactttaattcatgaagcttactttttttttttggtgtcagagtctcgctcttgtcacccaggctggaatgcagtggcgccatctcagctcactgcaacctccatctcccaggttcaagcgattctcgtgcctcggcctcctgagtagctgggattacaggcgtgtgccactacactcaactaatttttgtatttttaggagagacggggtttcaccctgttggccaggctggtctcgaactcctgacctcaagtgattcacccaccttggcctcataaacctgttttgcagaactcatttattcagcaaatatttattgagtgcctaccagatgccagtcaccacacaaggcactgggtatatggtatccccaaacaagagacataatcccggtccttaggtagtgctagtgtggtctgtaatatcttactaaggcctttggtatacgacccagagataacacgatgcgtattttagttttgcaaagaaggggtttggtctctgtgccagctctataattgttttgctacgattccactgaaactcttcgatcaagctactttatgtaaatcacttcattgttttaaaggaataaacttgattatattgtttttttatttggcataactgtgattcttttaggacaattactgtacacattaaggtgtatgtcagatattcatattgacccaaatgtgtaatattccagttttctctgcataagtaattaaaatatacttaaaaattaatagttttatctgggtacaaataaacaggtgcctgaactagttcacagacaaggaaacttctatgtaaaaatcactatgatttctgaattgctatgtgaaactacagatctttggaacactgtttaggtagggtgttaagacttacacagtacctcgtttctacacagagaaagaaatggccatacttcaggaactgcagtgcttatgaggggatatttaggcctcttgaatttttgatgtagatgggcatttttttaaggtagtggttaattacctttatgtgaactttgaatggtttaacaaaagatttgtttttgtagagattttaaagggggagaattctagaaataaatgttacctaattattacagccttaaagacaaaaatccttgttgaagtttttttaaaaaaagctaaattacatagacttaggcattaacatgtttgtggaagaatatagcagacgtatattgtatcatttgagtgaatgttcccaagtaggcattctaggctctatttaactgagtcacactgcataggaatttagaacctaacttttataggttatcaaaactgttgtcaccattgcacaattttgtcctaatatatacatagaaactttgtggggcatgttaagttacagtttgcacaagttcatctcatttgtattccattgattttttttttcttctaaacattttttcttcaaacagtatataactttttttaggggatttttttttagacagcaaaaactatctgaagatttccatttgtcaaaaagtaatgatttcttgataattgtgtagtaatgttttttagaacccagcagttaccttaaagctgaatttatatttagtaacttctgtgttaatactggatagcatgaattctgcattgagaaactgaatagctgtcataaaatgaaactttctttctaaagaaagatactcacatgagttcttgaagaatagtcataactagattaagatctgtgttttagtttaatagtttgaagtgcctgtttgggataatgataggtaatttagatgaatttaggggaaaaaaaagttatctgcagatatgttgagggcccatctctccccccacacccccacagagctaactgggttacagtgttttatccgaaagtttccaattccactgtcttgtgttttcatgttgaaaatacttttgcatttttcctttgagtgccaatttcttactagtactatttcttaatgtaacatgtttacctggaatgtattttaactatttttgtatagtgtaaactgaaacatgcacattttgtacattgtgctttcttttgtgggacatatgcagtgtgatccagttgttttccatcatttggttgcgctgacctaggaatgttggtcatatcaaacattaaaaatgaccactcttttaattgaaattaacttttaaatgtttataggagtatgtgctgtgaagtgatctaaaatttgtaatatttttgtcatgaactgtactactcctaattattgtaatgtaataaaaatagttacagtgac

SEQ ID NO: 34 - protein, 189 aa, synthetic construct
  REGION 1..189: note = KRAS G12D protein Isoform A
MTEYKLVVVGADGVGKSALTIQLIQNHFVDEYDPTIEDSYRKQVVIDGETCLLDILDTAGQEEYSAMRDQYMRTGEGFLCVFAINNTKSFEDIHHYREQIKRVKDSEDVPMVLVGNKCDLPSRTVDTKQAQDLARSYGIPFIETSAKTRQRVEDAFYTLVREIRQYRLKKISKEEKTPGCVKIKKCIIM

SEQ ID NO: 35 - DNA, 32738 bp, synthetic construct
  misc_feature 1..32738: note = Genomic Sequence for KRAS (WT)
  source 1..32738: mol_type = other DNA
gattttcctaggcggcggccgcggcggcggaggcagcagcggcggcggcagtggcggcggcgaaggtggcggcggctcggccagtactcccggcccccgccatttcggactgggagcgagcgcggcgcaggcactgaaggcggcggcggggccagaggctcagcggctcccaggtgcgggagagaggtacggagcggaccacccctcctgggcccctgcccgggtcccgaccctctttgccggcgccgggcggggccggcggcgagtgaatgaattaggggtccccggaggggcgggtggggggcgcgggcgcggggtcggggcgggctgggtgagaggggtctgcaggggggaggcgcgcggacgcggcggcgcggggagtgaggaatgggcggtgcggggctgaggagggtgaggctggaggcggtcgccgctggtgctgcttcctggacggggaaccccttccttcctcctccccgagagccgcggctggaggcttctggggagaaactcgggccgggccggctgcccctcggagcggtggggtgcggtggaggttactcccgcggcgccccggcctcccctccccctctccccgctcccgcacctcttgcctccctttccagcactcggctgcctcggtccagccttccctgctgcatttggcatctctaggacgaaggtataaacttctccctcgagcgcaggctggacggatagtggtccttttccgtgtgtaggggatgtgtgagtaagaggggaggtcacgttttggaagagcataggaaagtgcttagagaccactgtttgaggttattgtgtttggaaaaaaatgcatctgcctccgagttcctgaatgctcccctcccccatgtatgggctgtgacattgctgtggccacaaaggaggaggtggaggtagagatggtggaagaacaggtggccaacaccctacacgtagagcctgtgacctacagtgaaaaggaaaaagttaatcccagatggtctgttttgcttggtcaagttaaacccgaagaaaacccgcagagcagaagcaaggctttttccttgctagttgagtgtagacagcaatagcaaaaatagtacttgaagtttaatttacctgttcttgtcctttcccctatttcttatgtattaccctcatcccctcgtctcttttatactaccctcattttgcagatgtgttctacatctcaagagttattacagtactccaaaacagcacttacatgattttttaaacttacagaggaattgtagcaatccaccagctaaccgcctgaaatagacttaaacatgtgcatctcctttttttttttttttttgagacacagtctcgctctgttgcccaggctggagtgcaatggcgcggtatcggctcactgaaacctccgcctcctgggttcaagcaattctcctgcctcagcctcccgagtagctgggactagtaggtgcacgccaccatgcccagctaatttttgtatttttagtagagacagagtttcatcatgttggtcaggatggtctccatctgctctgttgcccaggctggagtgcagtggcgccgtctcggctcactgcaacctctgcctcctgcattcaagcaattctcctgcctcagcctcccgaataactgggattacaggtgtctgctgccatgcccggctaattttttgtatttttagtagagacgggggtttcaccatgttggtcaggctggtctagaactcctgacctcgtgatctgcccgcctcggcctcccacagtggcatgtgcatcttatagctgaagtctaagccttcttaaatcttgagatccatcaaaacagacaggttttctaattgttatacaatgtatatgttatgtttataatagaaatcattttacaaataagttataaatgggaaaggtctatttgtaattatcagctcagaattaaccataaaactggtgtcactgaagtgactgaggtccaaaatgctgactctgcatgttatagactacagatatcaaatatggttgctaacaatagtttactttgagactgtagccatccacagtatatttgcttttaagagatggtagatggtaattcagttttatgaaaaataaaaatgaattttcttccattacaaaattgttggattcgagtccagtccactccttactagcttttctaactctcggtgagggatcccctcccagcccatgatcttcatttggtaagactcctttggaacccagttctctctagtggatttaaatgtgatttggttttaaaaatctcattcaaggaattttttttttttctggaaacaaccaccgcataaacaagtaaaccggaagatacatgtggctctgaattcatatatatacacaaactctaatccaatgtctgtccacagtatttcctaggctagtaaactttttggccttaacgacccctctaccctctttgtttttttgagagagagagtctcactctgtcacccaggccggaatgcagtggcgcgatctcggcccgctactacctccgactctcaggctcaagcgattctcccgcctcagcttcccgagtagccgggattacaggctcccgccaccgggctaattgtatttttagatacgggatttcaccatgttggccaggctggtctcgacctcctgacctcaggtgatccgcccgcctaagcctcccaaagtgctgggattacaggccaccacacccggcctacactcttaaaaattatcgaaggggccgggcacattggctcttatctgtaatcccagcactttgggagactgaggcgggaggatcgcttgaggccaggagttggagaccagcgtactcaacatagtgagaccttgttataaagaaaaaaaaaatccaggattaaaaaaaatctttgatttgtttgggatttattaatatttaccgtattggaaattaaaacaattttttaaaatgtattcatttaaaaataataagcccattacttggtaacatgaataaaatattttatgaaaaataactattttccaaaacaaaaccaaaacttagaaaagtggtattgtttcacacttcagtaaatctctttaatgatgtggcttaatagaagatatggattcttatatctgcatctgcattcaatctattatgatcacacatctggaaaacttgtgaaagaatgggagttaaaagggtaaaggacatcttaatgttattatgaaaacagttttgacctcttgcacaccagaaaagtcttagtaacctgaggggttcctagaccacattttgagaactgttttaggctatgcaaactggttggggggaggttggggtaggcagagagctagaagatacattttagtgtaattctcctcatctattcctaattgctttggcctacatttgaaataaagcgtggaggcaaacgggataagatacatgtttgtagtggttgttaacttcaccctagacaagcagccaataagtctaggtagagcagagtaaggcggggaactatgccgtgaccgtgtgtgatacaatttttctagcctgtggtgctttttgcggcagggcttaggagtaaggttagtatgttatcatttgggaaaccaaattattattttgggtcttcagtcaattatgatgctgtgtatatttagtgtttatctacaatatatgcacattcattaatttggagctactcatcctataataaatagttgtgcatttactcccatttttttctgcatttctctccttatttataattatgtgttacatgagggaaaggaggtgaaattaaacattcatattatttcaaaaaatttgaaacaactaactaaaaaatatgttttattttctgtatggtgtttgttatacaatctgtcaatattcatgcacctcttgggagacagtgtatgaaaagcaaagagtaacagtcacatggattactgattactgagatatattcacttgcatctttttttttttttgagacggagtggctctgtcgcccaggctggagtgcagtggcgtgatctcggctcactgcaagctccgcctcctgggttcacgccattcttctgcctcagcctcccaagtagctgggactacaggcgcccgccaccacgcccggctaatttttttatatttttagtagagacggggtttcaccgggttagccaggatggtcttgatctcctgacctcgtgatccaccctcctcggcctcccaaagtgctaggattataggcgtgagccaccgtgcccggctcacttgcatctcttaacagctgttttcttactaaaaacagtgtttatctctaatctttttgtttgtttgtttgttttgagatggagtcttactccgtcacccaatctggagtgcagtggcgtgatctgggctcactgcaacctctgcctcccgggttcaagtgattctccttcctcagcctccccagtagctaggactacaggagagcgccaccacgcctgattaatttttgtatttttagtagagagagggtttcaccatattggccaggctggtcttgaactcctggcctcaggtgatccacccgccttggcctctgaaagtgctgggattacaggcatgagccgccgcacccggctttctaatctttatctttttttgtgcagcggtgatacaggattatgtattgtactgaacagttaattcggagttctcttggtttttagctttattttccccagagatttttttttttttttttttttttgagacggagtcttgctctatcgccaggctggagtgcagtggcgccatctcggctcattgcaacctcggactcctattttccccagagatatttcacacattaaaatgtcgtcaaatattgttcttctttgcctcagtgtttaaatttttatttccccatgacacaatccagctttatttgacactcattctctcaactctcatctgattcttactgttaatatttatccaagagaactactgccatgatgctttaaaagtttttctgtagctgttgcatattgacttctaacacttagaggtgggggtccactaggaaaactgtaacaataagagtggagatagctgtcagcaacttttgtgagggtgtgctacagggtgtagagcactgtgaagtctctacatgagtgaagtcatgatatgatcctttgagagcctttagccgccgcagaacagcagtctggctatttagatagaacaacttgattttaagataaaagaactgtctatgtagcatttatgcatttttcttaagcgtcgatggaggagtttgtaaatgaagtacagttcattacgatacacgtctgcagtcaactggaattttcatgattgaattttgtaaggtattttgaaataatttttcatataaaggtgagtttgtattaaaaggtactggtggagtatttgatagtgtattaaccttatgtgtgacatgttctaatatagtcacattttcattatttttattataaggcctgctgaaaatgactgaatataaacttgtggtagttggagctggtggcgtaggcaagagtgccttgacgatacagctaattcagaatcattttgtggacgaatatgatccaacaatagaggtaaatcttgttttaatatgcatattactggtgcaggaccattctttgatacagataaaggtttctctgaccattttcatgagtacttattacaagataattatgctgaaagttaagttatctgaaatgtaccttgggtttcaagttatatgtaaccattaatatgggaactttactttccttgggagtatgtcagggtccatgatgttcactctctgtgcattttgattggaagtgtatttcagagtttcgtgagagggtagaaatttgtatcctatctggacctaaaagacaatctttttattgtaacttttatttttatgggtttcttggtattgtgacatcatatgtaaaggttagatttaattgtactagtgaaatataattgtttgatggttgatttttttaaacttcatcagcagtattttcctatcttcttctcaacattagagaacctacaactaccggataaattttacaaaatgaattatttgcctaaggtgtggtttatataaaggtactattaccaactttacctttgctttgttgtcatttttaaatttactcaaggaaatactaggatttaaaaaaaaattccttgagtaaatttaaattgttatcatgtttttgaggattattttcagatttttttagtttaatgaaaatttaccaaagtaaagaccagcagcagaatgataagtaaagacctgtaagacaccttgaaggtcatggagtagaacttccatcccaagcagatgaggatttatttaatctcaaagacctccaggaggggacattccccaactgtccttgttaactcattttcagaacatatttattagcatattttacatgtaatttggatcttcatgttaaatttaacatcagtggagatggaaaataagcatatcgccttgtctttgaaatagccctatattgttagattgtttcttaggcttctttaccctgggttaagcagtcctaatactttagcatttattctacatctagtgtactaatttaaaaaaatcagttctgaaaaatttctaagaactttcttcaagttccaagctgtgaaatctagaacaggtcaaagtgccttattaacgtactgtactgtgtagtgtcttgaagagacactttgcgctgaggcaagttctgagggcattgggtggccttgggaagatatttatgcagtttagaacctggagaattgattagataactaatcataaggaaacgtcacatatttttggtactataaaaaagtggagaaataatgcctatttgcaaagatttgatttaaacatagaaacaactttatttggcttccaattttaagaatttacagcagtaaaggggaacagtctaattgaagtagactgcctatgcaatagtctctgtatatttacttttgacaagttaattcaatgtgtactatagttttgtttctttgaagaggtttgaatagtgcacccattttaatctgtattgcaaattcagggttacttggcagactctactatttaaatcagatgtaaaaggaagttttaatataattcactttatgcctgaaagttttcctgggattttggaaggtgattttactggaaatgctgtctgtcttccctgaaaatctgagaaattccattacactttgtttccaatcagaggtcatgagtgctatatgagtatatacagcatgacgtcatgaatgtgataaagtgggttaggaaaccttttgctaatgattgttaaaatgcaatataaatgttgaagaaataaagctaacagttaagcctttatttgggcggaaggctgaaaaagtttataaacttaaacctataactctgcttatgatttctgccaaaccagaagacttgactctgggaagcattggttacctgtgaactttgaaactgacggtccctgacgtagtttagtcacctgggaaaaggtatctgagattatctcttatctcccaagttacagtgagtctctgagggaactgacacattacattaagttcttggtgtagttaaactgtaagaaaggcaggagaacttagtagttaaatagttggttaaatggaaatgctgactccatgttattgtaaaaagttaaaaatttaggaggatatggggatttcactgccattgcaggttttgattggtatttaccaatccgtgtgggtcagagagaaaattagaaaggatatgactgcacattttggaattattagcagtttttctacatttaaaatggaaataaattttttaaaaatttaaatcaagtaatactgtattttttggtgatttagatttttcaaaatttacactaagagatagtaaggagggtggctattgtttctttcaataatgtctctgagaggttgtaactcatctaaggatacgtagctaataagtggtaggatttcaatttaaattctctgagaccaagttaagtagaatttgcactgtactcttgtataactttttaaaactgaaaattagctatctttcaaattaagaaaatatttactaatggagactaattcagatttgtaagtataccaaaatttgaacttagcctgctatctaatggcaacttagtggcagaggtatgatgtaaaatcattcaggtatgacacatagatggagtatgtttgtattcgaggctgtgcacataatcacctttacttgtattgtgaagtatatattgttatcttttatgaagcccactaaagagataatgaaatacctcgttattagggcaagattattgaaaactcaaaatagcccccaaacacaatacttggctagaaatatatacctttatagttcagagatcatttattatcaaaaccctgaagttttttttctaaggtaaaatttggtggaagaggaaaagtctcgttttaaaaaaatgtaggtagttacagagatcagaatgattagttgatcacttaccaaatatatattaagtatctactgtatataatatgctagtaagaataaatatagcaggaagtattttttcccaggctctaattgtttgacatcagcatgcttttattgtggcacttataattcagttcaagtattatgcccctctttgatggaacagtttcctattcagtaaggaagaccagattaatcattggattggtttgtttcatctttagtgttctgagctgtagagtatttatttaccaaggtttattttaatttttattttatttttatttttccatgttcattgtagaattcattttacctacgaatgaagtatgtagattatagagagaaaatttgtaaaattaaactgatactgaagactggtataagaaaagccttatgtaatttgtaagctgctattcttctgagtttatacatatatctttagtaatcaatgagggatggttgggtgactgccctccaggggacatttggcaacatctggagatgtttttggttgccacaacttggggagagagtactgctactggcatctattgagtagatgctattactttaaatggcaaagctgcagttacctttgcaccaacctaatattaaacttcctgcagtgcacgggaaagcccccacaacagggttatctgaccccaaacctcaatggtgttaagatccaaaccttgatatgttaacctgtagctttaaacatcctttaaattgtcaaattcatgtccctgacataaggtttatgttagattttcaagtataacaaagatttaaactttaacttttgtacgttaatgatatgttagcttactccagtcttctattaaaacattctgtttttaaaatcagagacacacagcaattttataaatcatttctcttcaaggctgtgaagctctccccacttttgtgagtgccctctactggtcaaattatttgctttataacaagtaacagtgaaatcctaagtttgtgtagtttcgctgtttaaattatgggtggcatcaatttataaatatattcgttttatttaaaagtcttatatgattgatttcgtatcatttttgctctctgctaatattaatataaagattactgtctgtattagttaggcctaactaagtaggtgagtatagtgaactaagaaaggaaacgaggcagtatataagaaaatagggtggttcagttgttaacacttactgagcttactttgttgaagggactaaaaggcagcagtgtggctctctgagcttctttgcatgcactcaggagctgcttaatggagtccaaggcttggtggtgtgttacaggggatgataggagggtcctattcagaagtggcaaattgtgaaagtgcacattttgtagagttttataggactgtagaatagttgtgagcacctgatttttagaataaacagaaaactcaggtactgtatttaggtcaaattaagaataagtatttattaagacctgaatataaaactttactggtcatggtttttttctaccttgggtttttataaatccaaagatttaaaaacatacaaatggaagttggtaatggaattaagtgaaaggaaaaaatgattttatggtttggaatctcctaagattctggttttaacaatacaactaattccttaatcctagaaatgttcttcactgcccactttgtaccatgcagtcttcctgtgggctagagatacactgaggcgcaaaacagaccagattcctgccttcatggagcttattagttttaggtatctctagatttcttgtaatacctattacaatgcctgcacatcagttcattcatgtgggttcaacgtagtactcagtacatggcaaattcaagttttacttttcggaacttcatggatttttttcctcagaatatcttttatccataattggttgaatctgtagatgcagtacccatggatatggatggcccactttattttgaagagcagtgtttctaggcaatcatgctaattatatatgacttaatttagaggctttatacttaagagcattacatttctggcgtctcttaaccattattatttcataatgtgtaggttatggaacagttaaattattgggatcttaatatagaaattagtagaaataagccagatatggtggctcatgcctgtaatcttagcactttgggaggctgaggctattcgctgtactattttttactacttttctataggtttgaaattttttcaaaataaaacattgaaaaaagtaaggtaggtagtgtgtccctccttaatcctttcaaatattttattttcactatttctattaatttttttttttgtttttgagatggagtctcgctctgttgcccaggctggagtgcagtggcgcgatcttggctcactgcagcctccacctcctgggttccagccattctcctgcctcagcctcctgggtagctggtattacaggcatgcaccaccacacccaattactttttgtatttttagtagagacggggtttcaccatgttggccaggctagtctcgaactcctgacctcgtgatctgcccgcctcagcagtgtcactgcttctagaccgttttcaaggcacagagcttagaaatgcatgttactaagaaatcaagagttaactatttttcaccttctttctcccgcagtgagaaccctggttctaccctgtttctccttgtgtaaattttaatgctaaactatacacttgtgaaataaaaatgataatgtcattcttaaattatggatcttgcagtgttatctaagtaacatagattgagtgatttaactttaggtttccttatttgtggaatttggataaatatttttcacccttgagaaaagtgagactcctttctcatcatcagagtatccttaaaccattaaggcaaacatttgggaaaaaactgagctatctggctgcataaaaattaagttttctttaacaaagatagaagacaaatgaaaacctagaaaaaccatttggttcaagtaacaggaagctatcttatatatgaattagagaaaagcaaacacacaaatagaaaaaaagggatggggggtactaaagatataaatagcttgtctaccaaaaaagaaataaaataaataacatgaacatataaaaagacacttacttcatgaatgtgatgcaagttcaaacaataaataacatttctgtactttcatattggctaaggttaaaatgataactgctaggaagggtatggagaagtgtgcgccttgcactgtagtgggagtatagaccctcagactttatggaggtcagtctggaaatatgtttcaaaatgtaaactacatgtcctttgaccaggtaattcaacttcttgaaatttatccaaggatttaattggataaatgtttaagatgtatatataagaatgtttactgcagtgttgtttatgattttaaaaaaatggaaatcatcttcatgtctaccaatagagaatgggtgaataaattatggtatgtccatatatacaaattacatagttgttggaaatattaggtagatttagatatactgatgttcaaaaatgtccattatgtaagtgaagctgggtcacagcaccttgtgttgagtatgatttcatctagaaacaaaattactccctcatcctttgttgtgttttagttttttaaaataagcttataccattgggctgggggaaaagtaaatactcgttttggagagagaaaagggcactaaagtttcagataccgttagattatttcatgcttatttttcaagcctcaataaattacataattcacatgtagtcttggattaaggaaattgctattaaggctaaataaataatatgagaggtatataatataaaatatgaacattatattggcattaagattggatccacggtcattccagcctctcattcttacctggacttcaagtgatcacttgtgggcaaatgccatctgacttgaacaggttacacatgtatgctcattatatcgttattttcaaaatttgtcatataaattttccttgagttcattcagatttttgaactagttttttctcttgggagtagtacacacttaattctctctagtactaagctaatgttcaccattcttataattttaagtatccagcatttagtaaagaagtctttgttttctttatccttacttttagtgaatgtcttagtttttaattgaaaattctgccatgaaaataagctctttaacatcttcactccctaatcaaaacagaaatccttcatagccttcagttgtagctatccttccctgtgatttgtccagctccattatatttattttgaaatatggtgaccagttttgcaaaattatttcaactgtaggtgcccagtgattttgtaaggagaagatactgtttctgaacagttctcagtagccagtggcctgcccctactttttggcctgcgtgtagtatataaaataatgcagttaactttttatagcacttttcattttataaagagattttcatggtctttaatattaatctatgtataaagtcctgtatgcagttttacctactttcacagctgaaggaacaatagcttagagaagatgtgagataaagtagtttgcccaagcccatagcacaaataagtgaagttcttcggctgtccatggatcgaagactcccaagtctatctctagcctggacttctgtcctgagcaccagacatgtatgtatatcaagatgcctgcaggtcatatccaccaggacaacccatgagtacagggaattcaacatgcccaatatcactcatcttttccttcgccctcccctttgtactcatcccctgtcggtaagctctgttattttaaaaaattgaaatgtattcacatagcatacaatttacacttttcaagtgtacatggtttttagtatattcacaagggttgtgcagtcattactactaattccagaatgttattatcaccccaaaagtcccacatccattagcagccactccccaatcccttctcccaccagcctctaaaaactgctaatttttccatctctgtggatttgtccactctgattatttcatataaagagaatcgtacagacgtggccttttgtgtctggcatcctccacacaggatgatattttcagagttcgtctatgtttttgcttgttgatcattccttcattcctttttctggctgaataatactctgttatatggatataccttattttgtttatctgttcatttgatgggcatttgagtgatttcctctttttggcaattttgaataatgccactataaacatttatgtacacgtttttgtgtgaccatatgttttcacttctctcgggtgtatatctaaggtacagttgctgggttatatggtagctctgtctttgactttttgaggaactgccaagtggttttggtagtgattgtactgtttacattcctaccaacaattttacctaagtatttctcaaatctatttaatcttttcggtccatactgctgttgctgccttagttcagattttgtcatttcttgtaataattcgtagctcatctcccagtctctgctcccctctctccctccctcccccttcttctctctcttatttccacccatttttaacatttatagaagtcaaaagtctagttcagaaagcagaaaccatactagatatttcagcacagagaactaattaggtgttggaagactgaaaggcaaaaaaacactgaagtaacacagtaacatcaagaatgggcactactcctaagattcagggaatgctgggaagatttggggtttatcagaactggaagctcagaggaggggccccttgtcgctgaggcttaatccctgcagaggtgcctttggctgctactggtgaatctgagtgggtatgatgagtcagtgtctgggaagggccaaaacattttgtccctttctataatttgtcatgataatgctagtaatgaatctgatctcccttcctattttaaaaaccttttagtgattttgtataggatgaagtttaaaactccttacttaatatacacatgaccctccgtaagctggcccctgcttgattgtccagtttcacttcttggtgcttattctaaggcctctaagccttagagatcctctaagcctttgagatccccaaaccctggactgcggactggtacccacctgtgtggcctgtgaggaactgggctgcacagccggaaggaggtgagcattacttgccttagctcctgtcagatcggcagcattagattctaataggagcgtgaaccgtgttgtgaactgcccatgcaaggatctaggttgcatactccttaggagaatctaactaatgcttgatggtctgaggtgaaacagtttcatcctgaaatcacccccaactcggtccttggaaaaattgtcttccacgaaactggtccctgatgccggaaaagttggggaccgctgttctaagctaaagttatatggagctccttggttctgtgtcctcaacatgctgttctatgttttttacattctgtttgctccttcctgcttggaatgtccttcccctccccgtctttcttaatgcatacaaagttgatctctcctgtgtgccaccattgtacttcgtcttgcatatggtgttacattcattttattttaattatttatttacgttcatgtctcttccactcaccttagttgcttgaggtcagaaactatataatgtgtgacacggaatgtgacacctagattttcaataagtgtttctatgatacaagggagactgatgtgggtagatgggaatgaactcatcaacctctgtttacataccctaaattccctgtttcttccctattataattctgacagtctacaaccgtctttgatggcttataaacggaaagtgcggaacacatcattctacagtgaatttaaataacctttcggaagagtaacgtaaagtacttgagcattaattgagtaaaagtttctcatcttttcctacaggtgttattaagcagtatgtaaaaagtccttacaatacttaatacattaagaaaacatacaatttcaagaggaaatccccgagtaatacattattgacattttcagcagttctagttatattgagaagagcatctcatggaattggcagaatgaagatggagattaaatgagatgatgtttgtaatatgcttatgacagtatctggcatataagtaagggctcagtaaatgttgactgctgtaattactattaatagtaatatgattacctttagtaaaagttattagtttctttaggttttttgtttactacaatatagtaaacaaaatctatacttggaatgtatatattgttttgttttgatacatggaatatgtctctgtgtcagagtcactgcctgagttggaaaacccatactcgagtatgttaaaaggtgaacacactgaataatttagttattaattataatggaaaaatgacaaacttgatgttctggttaatgaggttatcttatcttgaatgagttagcttttaaattcctcaaaataaaggcatttaataaaccaggaaacacttcattaaaaaaattatgcaagtcagtgtaaaagaagattaaaattccacatgggcaaaggacacacgttggcgataaatatgcagataagaaaaaaaacctatataacattattactcctcaaagaaattggtatgaaaacaataaaaatgtgtagcttatcaaaccaacaaaaatttaaaaatatgaaatccattttaagtaatgataaaatgggtgcactcttagtgctttatagaatagtagtataatgaacctcatgtgtgtaccaaccagctctttcatatcttaacatttagcaacatttgatttagctctttcttttttccaagatagaaaagttaatattgttgaagactcctgcattcttttccctagtcttattttcttccctcccataaatgtgttaaaatctctgtgtgtattgttttggttgtatttttacataaaactttacatattatataaaatttaattgaaggtaaaatttattaaattattcttaatatatattgtaatttaaaaattaacagcttcattgtcttgataaaatttatggtatcttaaacatgtgcttgtttttctaagagaacattgaaacatagattttaaaacaaattgttgaaagattaaaaaatctgcctttgcacactgttacattgaaagtggggcatttgtcgtgaacattcatttcaaatatgtagtatcttcagaatatttgagaaggatttgtattatataattgaaaaatctgttaaattgtatttatgttaactgcttaattctaataaaatttccattcattttttagtatctgcatatatttacatcaaatggattcattcacttatttaagaggcagtactaattacctatagcgttcaagactgttaggtagagggtgtgtagtggtgagtacaacaggcgtgagccctaccaacacggagtttaaagcctagtagaggatatagacttaaacaatttcacaagtaaatacataattacaaattataatacatgctatgaaggaaacataggaggtaccagagaaggaagagtgctttgcatttttatttttaagaccgaagagtgctattggaggactttgagcaagtgaatgacatgatctaacctaccttcgttcattcattcattcattcattttcttccttcctggctcaagcagtcctcccacctgagctccccaaatagctgggactacaggtacacactaccacacctaatttttttttgtattttttgtatttttgatgggattttaccatgttggccaggctggtcttgaactcttgacctcaggtgatccacctgtctcggcctcccaaggtgttgggattataggtgcctagcccatggtgcctagccctaacctacatttataaactatcacttgctgctgtgtggagactatattgtgagattaacagcagggatacctgctaggaagcaattgctgcagattgcctgagacaaaatagttatcatggactagggggatggtggtggtggtggtggtaggtggttggatgtaggatatattttgaagataggtaaatggtgcaagattatgggtcagttttaaatgcttaagtaaattttctttgtaagacattttaggatgccatgttaagaatctctttataactgtcatttaaaaaaaaaccacatattttcttagcataatttcccatagtaacattactatgtcaaaggctatgaacatttgaatgactttagataaatactgtaattgctttccaaaaatattgtgcttattatgtcaccagaaatgtttgaattctgtctacaattcagtcttgccagtatagtacatttcatttagaaaaattttttactatgtagatggaaaaaataatattttagctgggagtggggggactatggggaataactttccttcatttaatattttattgtgagttagtttaagttactttattttatcgtagtttcctaaggctacaaattagtaaccttggtaacttatgtacctaatttaaaagtttacttttttgaaaggctggaaatactaattaaaaacgtaacaccttcatccttgtctttgctccattattaactagtttcattacagaatctctgtgttttaaaatcagatgggttttcataaccagtactttctcagagtggtaaatttaaaaaaatatataaagagaataaataatatttgttgagaatacttcaaataatgtgaagagttattaacttacagcaggagttggcaaacttttctataaagggccatatgggtctttgtcacaaagtcttgggtttttgtttttgtttttttaaacagctatttaactattcctagctaatgggcaatacaaaaacagtgggcaagatttggcctgtgggcagtagcttgctgaaaccttatttagactctaaattttttgaaagagtctacattgatgcatatttttttttcttcctccaaatacagttgacccttgaacaacatgcgtttgagtgaccatgggtccacttgtgatacacgtttttttcccaaccaaatgcagatatggagggctgacttttcatatacctggatgttcctgggccaactgtaggactagaggctgggggggtcttggaaccaatgccgtgtgtataccagggatgactgtttcttatggcctgacctgaagttggaacagaatctttattaatatataatttttgttgcgtttgttttctctttatatttatccattctttttagatcgtatttcatttaacactttttcttctttagtttttaccaagttgcactgaaaatagctcagtgactaattgcacttctaagagtgaggaccctagttaaaattaactctaaaaatactgaatttttaacctaaaccttttatttctaatcaacagtattatttatgagtaggttatagattactttgaaacggaatgtgtctcagaactttgctatcgatatttttaaggtctggtagggaaaagataataggaatgagatttatcagtgaataggggactgctttcccagtttctcggtcgcactggtgtattcaccatggaagcatcttatgaaatatgtacataaactactaatatcccacattacaggttgactattctttatctgaaatgcttaggacctagaagtatttttggattttggtttttcagagtagggatactcagcctacattggtaagtaaagaatgtgaggtgacaggctgggcgcgatggttgacgcctgtaatcccagcactttgggaggccgaggcggatcacctgaggtcaggagttgaagaccagcctggccaatctgtactaaaaatacaaaaattagctggacacagtggcacgtgccagtagtcccagctactcaggaggctgaggtaggagaatcgcttgaacctgggaggcggaggttgcagtgactcgagatcgtgtcactgccctccagcctaggcaacagagcaagactccatctcaaaaaaaaaaaaaaaaaaaaaaaaaaagaatgtgaggtggcagcaataggtaggaagagtctttggtcagctttacatgctctgtagccatgcctgggtaatgggttgactctaagactctgtgctttgctcccacctcctgctttttcattactctttagaatggtttttaatttgtgatctataggagttctttcaagtatttaataagagaataggctaaattaagtaaatgtcaactgaatgctcaaatctctactaaagagcctcttatttagaaaataaatatccatcttttttttctgactggtgagataattaatttttattacagatggtttggaaaataccatatgctttaaaagataagcacaaaattatagtctaatatgtaggttttcatactttaaaaaattgaaaaccaaagaaaaacatttaacatagcatctagtacaaagaaaagagataagcaagagataaatgtcttttttgggacagagttttgctgttgttgcccaggctggagtgcaatggcacaatctcagctcaccgtaacctccacctcccgggttcaagtgattctcctgcctcagcctcccgagtagctgggattacagtcatgcaccaccaggcccaggtaattttgtatgtttagtagagatggggtttctccgtgttggtcaggctgatctcaaactcccgacctcaggtgatctgcccaccttggcctcccaaagtgctgggattacagacatgagccatcgcacccggccaagataaatgtcttttaaattatctccattaaagacataacctttataacattttgatgtatatattaccagtttttaaacacatagtagatttgtataaatacataaacacatattattgtgatcatgctgcacttagacatctttatattctccttatactgtaaacattttgaaatactttactaacaacatttgtaatgaccattctttctctctttctccctctgatagaatggtctacagagtaattcataaactaaacatactttagaggctgggcgcagtggctcatgcctgtaatcccagcactttgagaggctgaggcgtgcagatcacgaggtcaggagttagagaccagcctgactaacatggtgaaaccccatctctactaaaaaaacagtacaaaaattagccgggcgtggtggcgtgcacctagaatcccagctactcaagaggctgaggcaggagaatcactcgagcccaggaggcagaggttgtagtgagccgagattgcaccacagcactccagcctgggcgacagagcgagactccatctcaaaaaaaaaaaaaaaagatacattaatactatagcctacatgtggaacattaagaaaataattgcttttatgtttatgctttatacctgttgttagccctgcttcttatttcatgatttcatggcttcacattgtaacatccctttaccatattttttgaggactgttttggcagaatgtgtgaaatcttgagcagaagtattacccaaaagtcagaagaaaatcagatttttatttcaagattctgttaaagttacccactcccttcttttacttaatcttatagttgcagttctctctctttttagaaaagaaaaaagaggcccctcaggatttgcagatgaaacaatattgctctttagagatatccatctggctgttagattatttttccacagttttcagaagtggatgaggccattagaatcttgagtattgcccatttccttatgtgtgcctttgactatagataaaatagatgcatgacaattatttataagttgattgatttttcttgtcatttaaatcatcttgaataatagagttggtagagctatcccatttttgaaattattttgttttgtcaataactttttgttaccagcatgtacacttgcattgttgactctccatataatacctttaaaaaatttttttttgtggtaaaatatgcataacataaagtttaccatggtagttttctttcatttgttttgtttttgtttttttgagacggagccttgctctgttgccaggctggagtgcagtggagcgatcttggctcactgcaacctccgcctcccgggttcaagcaattcccctgcctcagcctcctgagtagctgggactacaggcgcccgccaccacgcccggctaatattttgtattttaatagagatggggtttcaccatgttggccaggatgttcttgatctcctgacctcatgatccgcccacctcggcctcccaaagtgttgggattgcaagtgtgagccaccgcgcctagaccatggtagttaattttaagtgttcaattcagtgaccttaagtgtgttcataatgttgtgcaaccatcaccatgttgtctaaccattagcactatctgttttgagaacttttttttatcatcccaaattagaattctgtacctgtcaaatagtccccagtaatcctccctcccccagcccctggtaatctgtagtctacttttcgtctttttgaatttgcctattttaggttcctcatataagtggaattatgtggtatttgtccttttgtgttggcttacttcatttagcataatgttttcaaggttcatctgtgttgtagcatgtatatacaggttgaagcatccgttatccaaaatggttgtgaccagaagtggtttggatttcagattttttttttggattttggaatattcatagatacttaactggttcagcatccctcgtccaaaaatccaaaatcagatggagctcagtggctcatgcttgtaatcccaacacgttgggtggccaaggcaggaggatcgcttgagcccaggagttcaaccagcctgagcaacacaagaccctatctctccaaaaaaaaaaaaaaaaaaaaaaagatgaaagaaaaaaaaatccaaaatcaaatgctccagtgagcatttccttttagcatcatgtcaggctctaaaagttacaggttttggagcattttggatttcagatttttggattaacctgcattaatgctcaacctatatgaaattttattcctttttatggctgaataatgttccactgtatgtatatactacattttgtttatccattcatctgttaacagacacttaagttatttccacattttgggtattataaatagtgctgctgcgaacattggtgtacatgtatctgtttgagtccctgtttttagttattttggttatatacctaggaatggaattgctgatcatatggtaattctgtgtttaactttttgaggaactaccactgttttccacaatggcatcaccattttacattcccaccagcaatgcacaaagatttcagtgtctgtatccttgctaacacttattttccattttttgagtttttttgttttgtttttttaataatagccaatcctaatgggtatgtggtagcatctcatggttttgattttattttcctgactattgatgatgttgagcatcttttcaggtgcttagtggccatttgtccgtcatctttggagcaggaacaatgtcttttcaagtcctttgcccatttttaaattgaattttttgttgttgagttgtatataacaccttttttgaagtaaaaggtgcactgtaataatccagactgtgtttctcccttctcaggattcctacaggaagcaagtagtaattgatggagaaacctgtctcttggatattctcgacacagcaggtcaagaggagtacagtgcaatgagggaccagtacatgaggactggggagggctttctttgtgtatttgccataaataatactaaatcatttgaagatattcaccattataggtgggtttaaattgaatataataagctgacattaaggagtaattatagtttttattttttgagtctttgctaatgccatgcatataatatttaataaaaatttttaaataatgtttatgaggtaggtaatatccctgttttataaatgaagttcttgggggattagagcagtggagtaacttgctccagactgcatcggtagtggtggtgctgggattgaaacctaggcctgtttgactccacagccttctgtactcttgactattctacaaaagcaagactttaaactttttagatacatcattaaaaaagaaaaccataaaaaagaatatgaaaagatgatttgagatggtgtcactttaacagtcttaaaagcaatcgtgtgtatagcatagaattgcttggattggataaacagtggcattatatattttaaaaaataaaagttttgaaagattgaagaatttgggcattacagttctcttaaatctgacaaagctgcataaaactattaaaataatcattattatactattttatattctatttctttgagggtttagttttccaaaaactacatattaagcaaatgaatcactcagtggctatgtcatataataacgagttagcctagttataagaagtttaacattttatttaagaacattgttacagcatgtttactgtatagtctagtaatagaggaaaagacatttgggtgggtggtagtggtagtatttttatagaggagttaccaaatttcagctctattatccaagtttacccagctaatggtgttcggaaccgggaatttgagccaattctgactctgttgtctgctctgctccttcttttgtgctgtgtctttgaaagtcacctaaaattgtgagggaatgtaatttcaccccaaatttagagtttatgcacttgttatattgaaaatgattaacatgtagaagggcttttaatggaataagtggtgtagtaacttcagtgttgcctacctagaaatcaaaatctttctagttgtccactttgttttttgaaaaagtaatatgaaaattatgttaatgctttaattcaggtttttgtaaaatattttttatctttacacatttaacatacgtttctaaaattatagtctgttatatagcactttgggtctagaatttttcagtagtttctgttttactattatgatctacctgcatattaacctattaggttatagttttactatacttctaggtatttgatcttttgagagagatacaaggtttctgtttaaaaaggtaaagaaacaaaataactagtagaagaaggaaggaaaatttggtgtagtggaaactaggaattacattgttttctttcagccaaattttatgacaaaagttgtggacaggttttgaaagatatttgtgttactaatgactgtgctataacttttttttctttcccagagaacaaattaaaagagttaaggactctgaagatgtacctatggtcctagtaggaaataaatgtgatttgccttctagaacagtagacacaaaacaggctcaggacttagcaagaagttatggaattccttttattgaaacatcagcaaagacaagacaggtaagtaacactgaaataaatacagatctgttttctgcaaaatcataactgttatgtcatttaatatatcagtttttctctcaattatgctatactaggaaataaaacaatatttagtaaatgtttttgtctcttgagagggcattgcttcttaatccagtgtccatggtactgcttttggctttggtttctttctacattgaaaatttctcttcaattctgagcacatgttaacatttagaattcaagaggtggggatttttttttcccatggttacatatatatatatatatatatatatatatatatatatatatatatatataaagaacagggcaacaaatttttgcgttttctatttcggtagtacttttaaaccattatgtcatgtttctaggttaaacgttgttgtatttgaagaattttactttggcagaatttttttgaggatgtgtttatttctggagaaaggtctcattaaagaaagacaatacccagaaagccaacagaaattctgttactcatttaatgcatttttctgacaaaaattattgccagagagaacctgaattttgtttcaaaaatcatctttgttttaaaaatgactttttcttcaggtaaaataaaataatttcagttgctattatttaacctgtttgtatgaagagtttaacatataggaaatgaatacataaagataggaaggaattaattgttatatgtagtcatatgtctcttaatgacagggatactttctaagaaatacattgttaggtgattttgtcattgtgcaaacatcatagaatatacttacacaaaccttggtagtataacctactatacacctgggatatgtagtatagtctcttgccccagggatacaaacctgtacagtatgtaactgtactaatgactataaggcaattgttaacacaatggtaagttttgtgtgtctaaacctacacttgggctaccctaagtttatatatttttttaaatttctgttcaataataaattaaccttactttactgtaactttttaaactttttaatttttcctaacattttgacttttgtaatacagcttaaaacacacattatacagctatacaaatttttctttccttatatctttattctgtaagcttttttccatatttaaaattttttgtttgtttttacttattaaacttttttgttaaaaactaagacatgcatgcacattaacctaggcctacacagggtcaggaccatcaatatcattgtcttccacttccacatcttgtcccactggaagatcttcaggggcagtaacacacgtggagctgtcatctcctataataacattgccttcttttggaatacctcctgaaggacctatccaaggctgtttatagttaacttttttttttttttttttttttttttagtaaataggaggagtacactataaaataacaatataggtgctataccattatacaactgacagtgcagtaggtttgtttacaccagcatcaccacaaacacgtgagcaatgtgtcgtactacagtgttaggatggctataacatcactaagcaataggaacttttaaactccattataatcttatgggaccactatcacatatgcaatctcctgtggaccaaaatgtcattatgtggtacatgactgtactaagaaattgatccatctatattccatcaatttgtttagggctttttctggttacatttacctgtgagcccagaaaaccagttttgtagaaattaacttctgtaatgctaggagttaaaaaaaattgctgaacaacttttacattgttaaacatttaaaaacaagcgttctagaagtttatcaaatttcataaaggtgcaaaaatgtaaatgtaaatcattatccagctaatatatatgttgtatttccctagtaggagagcatatgtacctcttcctagttatacaaatttgatatatagtaaagaaacagtaaattctacttcaagtcattttgggaggattaaaaactgaatttctctagtttgaccattgtacagatttatctggcaattttactaaaacctgatttataggttaaacttggtgtatatcatatatcactttactttagaggaattaagatttcacataaatccatttccaggttccaaagaccaggaagaggcttggtttttgtttttctttttactgtctttacagtctccttgacttttcttaggagagaaggtactgagaaaacatgattctaatatttattattttttcttccaacattttcttatgaaacattttcaaatacaaaattgagttttatttaaaacatttgcaaatatactacctagattctaccattgttgttttatatttgctttacttacaacttttaaaagatgctttttataccactgaacattttagcttacatttcacaaagaaaagaaaaaatttaagagactttgcataatgttttaaggggttgcagtaaagaagtgcttcttatattttcttatgcatacaaatcagctgggcttattaaaatccagattctaattcagaaggtttaggtggggaccgagtctgcatttctaacaaactcctaggtggtatttttcttggtacttggaccatactttgagtagaaaagcagtagaggacataaaaagagtcttgttagtcccactttgttgctgtccacttctcatttgataatatcctaaaatagctgtgtctcctttttggtggttgtatgattactacctcagaagtactaattgattcttgctatttgaccttaatactttaatataacacagcattcatatttgatcagaaaactatctggcttccttttataagagatttttaggttttatacagttttgtggccttgggtttttttgtttgatttgtttttttgaaggtatataatatgtaagtagataaacaaatttgatttgtagacatttttatgtggatcatctaattaaaaatggagggatacagtatgaaagaatacttgtacttcttaacagagcactcaacctttcttttacatcctgtttcactgatgttattatgtaatttatgttgctaaactataaattagatatttaatttctgttctttgatttccttttattattaaatggacttgttgatttgcctagaaattaatttgcctttcaaaagtcttattaatcttcctccgttgaaattaatttgatatttgcatgcttctggaagactttaaagagctattccgagtaactgtagagattataaaatgaaatatgggaattttaataaattttacatctccagttactggtgaaaatgtcaagtcctcctttctgcagagtattttgttactcatctgttattcagcttatttatttatttatttatttatttatttttctttctttcttgttttttttttttgagacggagtcttgctttgtcgcccaggctggagtacagtggtgggatcttggctcactgcaggctccgcctcccgggttcacaccattcttctgcctcagcctcccaagtagctgggactacaggcacccgccaccatgccttgctaaatttttgtatttttagtagagacgggtttcactgtgttagccaggatggtctcgatctcttgacctcgtgatccacctgcctcggcctcccaaagtgctgggattacaggcatgagccaccgcgcctggcccttatttgttttttaaacaaaattagtgtgcatatccttgttgtattttatcggcaagttgttttatgccctaacttttggggtcttgatcatgagcctaaaacacgtaaacacccaaaaagaattatattccggttaaaggaacaaaacattcatttagaagttctcatccatgtaaatcagaggctggcaaatattttctgtaaagggccaagatagtaaatgttttaggctttgagggccacaagtggtatctgttgcatttttttttaattatgaccctttaaaatgcaaaaatcgttgttagcttgtgcatagtataaaaataggctggccgcatgctgtggctcatgcctgtaatcccagaaatgaggtgggaagccgaggtgggcacaccacctgaggtcaggagttcgaggccagcctggccaacgtggttgaaaccccgtctctactaaaaatacaaaacttagccaggcgtggtggcgggtgcctgttatcctggctactcaaggggctgaggcagtagaattgcttgaacctgagaggcagaggctgtagtgagcccagatcaagccagtgcacaccagcctggacgaccgagcgagactctgtctcaaaaaaaaaaaaaaaaggctgtggctgcatttggtccattggctgtaatatgctgattcctaattctctgggtaactttagtgtttgattagctactagaagttaggttaaacttttgtattttacaggctaactttaataatcttaaagtaaaacttaacatagttcatggaaaggaaatagaaattttaccctagtactcttttttttttttttttttttttttgaggcagagtctccctctgtcacccaggctggagtgcagtggtgggatcttggctgattgcaacctcctcctcctgggttcaagcaattcttgtgcctcagcctcccgagcagctgggactacaggcacgcaccaccacacctgactgatttttgtatttttagtagagacagggtttcgccatgttggccaggctggtcttgaactcctggcatcaagtgatcctcccatctgagcctcccagtgtgctgggattacagacgtgagtcactgtgcctggtctctagtattttttttttttttgagacggtctcactgttgccaggctggagtgcagtggcgcgatcctggctcactgcaacctccgcttcccggattcaagcgattttcctgcctcagcctcctgagtagctgggactatgggtgcacaccaccacgcccagctaatttttgtatttttagtagagacggggtttcaccatgttggccaatatggtctcaatctcttgacctcgtgatctgcccgtctcggcctcccaaagtgctgggattacaggcgtgagccactgtgcccagctgtactttttaagataagaattgcagggtatatatttttaccaacttaataacttataattttaaaaagctaattacttggctagaatataatgcgttacatattctttacactcagttcagtccatatctgaaaggcaaatagaattattttctgctagtacattgtgtagtccctatgttcctagtgtataaggactgttacctagttcacatttatctgggttgttgacagattttcctggtccctttggacagtgcatggccatgttggcaaaagctgtcaaaattgaaacattgacaccatgagaattgtgtgttttccagtctgctaaaatcaaaagtgggagggttcagtaaggtgaataacagaagcagagttttcggggtatctgttactcctcattcggcttttctgctctctgggggtctcaatttaaatataatgtgaaaattagttttacgaacctaaaaatgttgagtgattcatttcctggttttgttgttaatttctagatatttaaattaattgttagaagaaccccgttaaagaatgctttgcaaaacaacctccttatgtgctatgtctctgtttaatagtagttgagtttgtgtacatgagatcaatattttgaactatagctttttatgagttaaaaattgacggaacagttactgtgcacttgctgtgcaccatggtagtctcccaagtagtggtttttctgcatttcaatagtacatgagataggctgtgggtggcaaggtttcttgagaaagtgagggatgcacagttgggttttagaatacatcttgttcctccatgcccttccccaccaaaaggctggtagtcttgcatttgtatatagttagggtatttgatgtgttgcttccttgacagagttttgcaagaatttgcagatttaacaggaacaaaaacttacttaaaacaaaatctcttagtaaaagcatagtctagcaagatttagaatgatactttggctaacagtactttctctatatggagtgctttgtttccatagcctcacaagtatgttttcagataatagttgagttgaaaatgttgtcaatctcttgattttaaaaaatttacatatttaaagttgtatacttttgttcctacgtattttcagttgttcttaaagtttaataagtgacatttgaaaatgagtatatgtgtataaaaacaaaagtaggctaggcacggtggctcatgcctataatcctagcactttgggaggctgaggcaggcggatcacaaggtcaggagtttgagaccagcctgggcaatatggtgaaacccccctctactaaaaatacaaaaattagctgggtgtggtggtgcatgcctgtagtcccagctactcaggaggctgaggcaggagaatcgcttgaacccggaggtggcggttgcagtgagccgagattgcaccactgcagtccagcctgggcggcagagcgagactccatctcaaaaaaaaaaaacaaaaaaagaaaaagttaaaaaaaaacaaaaaacccccacaaaatgagtatatgtggcaacaagtcctattctcaaaaaaattattgtgtgctagttaagagcttaatgagtagccagtcggtattaaatatctgtttcagctatattttatctttaaaaattatctacagattttggaatgtgaaaaactagtgttttgtttcataggtatatactgtaggcattttaaaaataagagccagtgccagtggtttacagtgtacacaaggataatgttctcatgttctcttgatgtcagtatgactttaaagcatattatcaagaaataactaagtctgaaaaactgtggtaaataactggtactctaaaacctaagtttcttattactaaaaataagaaatggtaaaagtcaccctgtgctgttaattatatgagccactgaggtcctgacactgaattcttggtggtggataataatctcttctttttaattattggcttccaattctctctgcattgctggaaacaaaaatcatatatttcactattggtggtggggatgctgtcactgaaaaagtagacacattcatattgattttagaaataagttaaaatcaaaatttgcttctgctaaattagtagaggaccaatactgtttttctccttcatagtatgttttggtacttctacattgacattataacttttttttttttaaacagaaatagaagtttacattcttagaa

SEQ ID NO: 36 - protein, 188 aa, synthetic construct [sequence omitted]

SEQ ID NO: 37 - DNA, 5306 bp, synthetic construct
  misc_feature 1..5306: note = KRAS (WT) mRNA
  source 1..5306: mol_type = other DNA
ctaggcggcggccgcggcggcggaggcagcagcggcggcggcagtggcggcggcgaaggtggcggcggctcggccagtactcccggcccccgccatttcggactgggagcgagcgcggcgcaggcactgaaggcggcggcggggccagaggctcagcggctcccaggtgcgggagagaggcctgctgaaaatgactgaatataaacttgtggtagttggagctggtggcgtaggcaagagtgccttgacgatacagctaattcagaatcattttgtggacgaatatgatccaacaatagaggattcctacaggaagcaagtagtaattgatggagaaacctgtctcttggatattctcgacacagcaggtcaagaggagtacagtgcaatgagggaccagtacatgaggactggggagggctttctttgtgtatttgccataaataatactaaatcatttgaagatattcaccattatagagaacaaattaaaagagttaaggactctgaagatgtacctatggtcctagtaggaaataaatgtgatttgccttctagaacagtagacacaaaacaggctcaggacttagcaagaagttatggaattccttttattgaaacatcagcaaagacaagacagggtgttgatgatgccttctatacattagttcgagaaattcgaaaacataaagaaaagatgagcaaagatggtaaaaagaagaaaaagaagtcaaagacaaagtgtgtaattatgtaaatacaatttgtacttttttcttaaggcatactagtacaagtggtaatttttgtacattacactaaattattagcatttgttttagcattacctaatttttttcctgctccatgcagactgttagcttttaccttaaatgcttattttaaaatgacagtggaagtttttttttcctctaagtgccagtattcccagagttttggtttttgaactagcaatgcctgtgaaaaagaaactgaatacctaagatttctgtcttggggcttttggtgcatgcagttgattacttcttatttttcttaccaattgtgaatgttggtgtgaaacaaattaatgaagcttttgaatcatccctattctgtgttttatctagtcacataaatggattaattactaatttcagttgagaccttctaattggtttttactgaaacattgagggaacacaaatttatgggcttcctgatgatgattcttctaggcatcatgtcctatagtttgtcatccctgatgaatgtaaagttacactgttcacaaaggttttgtctcctttccactgctattagtcatggtcactctccccaaaatattatattttttctataaaaagaaaaaaatggaaaaaaattacaaggcaatggaaactattataaggccatttccttttcacattagataaattactataaagactcctaatagcttttcctgttaaggcagacccagtatgaaatggggattattatagcaaccattttggggctatatttacatgctactaaatttttataataattgaaaagattttaacaagtataaaaaattctcataggaattaaatgtagtctccctgtgtcagactgctctttcatagtataactttaaatcttttcttcaacttgagtctttgaagatagttttaattctgcttgtgacattaaaagattatttgggccagttatagcttattaggtgttgaagagaccaaggttgcaaggccaggccctgtgtgaacctttgagctttcatagagagtttcacagcatggactgtgtccccacggtcatccagtgttgtcatgcattggttagtcaaaatggggagggactagggcagtttggatagctcaacaagatacaatctcactctgtggtggtcctgctgacaaatcaagagcattgcttttgtttcttaagaaaacaaactcttttttaaaaattacttttaaatattaactcaaaagttgagattttggggtggtggtgtgccaagacattaattttttttttaaacaatgaagtgaaaaagttttacaatctctaggtttggctagttctcttaacactggttaaattaacattgcataaacacttttcaagtctgatccatatttaataatgctttaaaataaaaataaaaacaatccttttgataaatttaaaatgttacttattttaaaataaatgaagtgagatggcatggtgaggtgaaagtatcactggactaggaagaaggtgacttaggttctagataggtgtcttttaggactctgattttgaggacatcacttactatccatttcttcatgttaaaagaagtcatctcaaactcttagttttttttttttacaactatgtaatttatattccatttacataaggatacacttatttgtcaagctcagcacaatctgtaaatttttaacctatgttacaccatcttcagtgccagtcttgggcaaaattgtgcaagaggtgaagtttatatttgaatatccattctcgttttaggactcttcttccatattagtgtcatcttgcctccctaccttccacatgccccatgacttgatgcagttttaatacttgtaattcccctaaccataagatttactgctgctgtggatatctccatgaagttttcccactgagtcacatcagaaatgccctacatcttatttcctcagggctcaagagaatctgacagataccataaagggatttgacctaatcactaattttcaggtggtggctgatgctttgaacatctctttgctgcccaatccattagcgacagtaggatttttcaaacctggtatgaatagacagaaccctatccagtggaaggagaatttaataaagatagtgctgaaagaattccttaggtaatctataactaggactactcctggtaacagtaatacattccattgttttagtaaccagaaatcttcatgcaatgaaaaatactttaattcatgaagcttactttttttttttggtgtcagagtctcgctcttgtcacccaggctggaatgcagtggcgccatctcagctcactgcaacctccatctcccaggttcaagcgattctcgtgcctcggcctcctgagtagctgggattacaggcgtgtgccactacactcaactaatttttgtatttttaggagagacggggtttcaccctgttggccaggctggtctcgaactcctgacctcaagtgattcacccaccttggcctcataaacctgttttgcagaactcatttattcagcaaatatttattgagtgcctaccagatgccagtcaccacacaaggcactgggtatatggtatccccaaacaagagacataatcccggtccttaggtagtgctagtgtggtctgtaatatcttactaaggcctttggtatacgacccagagataacacgatgcgtattttagttttgcaaagaaggggtttggtctctgtgccagctctataattgttttgctacgattccactgaaactcttcgatcaagctactttatgtaaatcacttcattgttttaaaggaataaacttgattatattgtttttttatttggcataactgtgattcttttaggacaattactgtacacattaaggtgtatgtcagatattcatattgacccaaatgtgtaatattccagttttctctgcataagtaattaaaatatacttaaaaattaatagttttatctgggtacaaataaacaggtgcctgaactagttcacagacaaggaaacttctatgtaaaaatcactatgatttctgaattgctatgtgaaactacagatctttggaacactgtttaggtagggtgttaagacttacacagtacctcgtttctacacagagaaagaaatggccatacttcaggaactgcagtgcttatgaggggatatttaggcctcttgaatttttgatgtagatgggcatttttttaaggtagtggttaattacctttatgtgaactttgaatggtttaacaaaagatttgtttttgtagagattttaaagggggagaattctagaaataaatgttacctaattattacagccttaaagacaaaaatccttgttgaagtttttttaaaaaaagctaaattacatagacttaggcattaacatgtttgtggaagaatatagcagacgtatattgtatcatttgagtgaatgttcccaagtaggcattctaggctctatttaactgagtcacactgcataggaatttagaacctaacttttataggttatcaaaactgttgtcaccattgcacaattttgtcctaatatatacatagaaactttgtggggcatgttaagttacagtttgcacaagttcatctcatttgtattccattgattttttttttcttctaaacattttttcttcaaacagtatataactttttttaggggatttttttttagacagcaaaaactatctgaagatttccatttgtcaaaaagtaatgatttcttgataattgtgtagtaatgttttttagaacccagcagttaccttaaagctgaatttatatttagtaacttctgtgttaatactggatagcatgaattctgcattgagaaactgaatagctgtcataaaatgaaactttctttctaaagaaagatactcacatgagttcttgaagaatagtcataactagattaagatctgtgttttagtttaatagtttgaagtgcctgtttgggataatgataggtaatttagatgaatttaggggaaaaaaaagttatctgcagatatgttgagggcccatctctccccccacacccccacagagctaactgggttacagtgttttatccgaaagtttccaattccactgtcttgtgttttcatgttgaaaatacttttgcatttttcctttgagtgccaatttcttactagtactatttcttaatgtaacatgtttacctggaatgtattttaactatttttgtatagtgtaaactgaaacatgcacattttgtacattgtgctttcttttgtgggacatatgcagtgtgatccagttgttttccatcatttggttgcgctgacctaggaatgttggtcatatcaaacattaaaaatgaccactcttttaattgaaattaacttttaaatgtttataggagtatgtgctgtgaagtgatctaaaatttgtaatatttttgtcatgaactgtactactcctaattattgtaatgtaataaaaatagttacagtgac

SEQ ID NO: 38 - protein, 189 aa, synthetic construct [sequence omitted]

SEQ ID NO: 39-40 - skipped (2 entries)

SEQ ID NO: 41 - DNA, 75171 bp, synthetic construct
  misc_feature 1..75171: note = STAT3 Genomic Sequence
  source 1..75171: mol_type = other DNA
ggtttccggagctgcggcggcgcagactgggagggggagccgggggttccgacgtcgcagccgagggaacaagccccaaccggatcctggacaggcaccccggcttggcgctgtctctccccctcggctcggagaggcccttcggcctgagggagcctcgccgcccgtccccggcacacgcgcagccccggcctctcggcctctgccggagaaacaggtgaagggggtgcagggtggggccgttggggaggcctggggacccgggggctccgcagcggcagggggcctctgggaccttggggatgttgtgatggacgctgcagtggggccgggagagatgaagagacgcggagggtcgccctgagggaagactcttcgggatgacaggagcgggcctcggaagggactcggggcgctggagggaagtttcgttcttcggagaaacagaacgcgctcgagggggcaccgtggggcgagggcgcactcggttgcggcggcaggagtgagggacagtcccccgatttcctgctccctggggccctggggacgttccggccaccggagcgactgtcacgccgacggggatcaccggcgcgagtggggggtcggaaagcgcctcctccccgcccggtcggcggctcccgctgagccacttcctccgcttgccctgttcccgctccttcaggagacagctgtgcccttttggaggcaggaataggtgtgtctgtcgcctgcagccttacgggctggctggtcgtgggtaggctttattgcataagaatcaagtttcctgtagggaaattgacagaccggtactctttctaaattccctcgcatctttttctaggttaaattatgctccccccacgtccccgccttgtaaaaaagagaaaaaaagacaaaataaaatccccatcaacccgtcaagccagctctagagagagaaataaacctcttgacattgtccttttccaaatacctggtaaagtcggccagaagataaataattgagccattgcatttactggattgtggtgttgcttaattgcataggacggaatgaaccaattgagagtgggagttttctgtctcagagccaagatcttgggtaaatgcagaggagagggaaacaaagacaggctggccttgaaaaaaccatgtgtgcaaactttacatgcatttggggggtgtggttgcactgaagttaacaagattcaaaccgtcgcccaagttggtatttccatgtttggtacacatcactctgtgccatatcaggtcgttgttaagtgtggtgacaaaatcagtggttagtcatttttttaattaaaaatgtgtatagtgtgtacctgctggtcttactgtatgtgcaactaaaggtttacatagtctgtgtatgggttgtaaatttttggctggctgtgctgataaagcattgggcttgaataaagcaaagcagaaaatcatctcaatcttttatatgtggatttagactgtgttatgacttggttcagccagttttctatcttattttatattaaatatgtctgtgttctctgagtcagcacatttatttccttattacatgttccagacaggagtgctagcccagtttttgttcagtttgcacagtgggatggggaaacaagtctggaatttaaaaaaaaatgttttagaggttggagccttgattttagtctctatattagcacatccatcacaaagaaccattagtaaattcatgaatcttttgttttttatgtagttcatttgagaagaataatcacttagaaatatccacagtgccaggcatggtggtgcacacctctgatcccagctaattgaaggctgaggtgggaggattccttgagtccaggagttgagtctggtctgggcaacatggtgagaggccaggaattgggtctagagtctagtctaagcaccataatgagaacccatctttaagaaagaaagaaaggaaaggaggaagaaaggaaagaaaaagaaatacccacagcacagttatgaattaacccacaaaggacttgtgaggtgggtagttcacataacaattaccctaatatcgtagataagaaaattgaggccaaaggatcaagacacttggccaacgcagcagagtgccatagtggtggaatttgtgcctccttctgtatattttgtgaaaagtatcagtgaaattctttttttttttttttttgagtcagagtcttgctctgttgcccaggctagagtgcagtggcgcaatcttggctcactgcaacctctgcctcctgggttcaagcgattctcctgcctcagcctcccaagtagctgggactacaggcgtgcgccaccacgcccagctaatttttgtatttttagtagagaccggggttttaccatattggccaggctggtcttgaactcctgaccttgtgatttgcccacctctatctcccaaagtgctgggattacaggtgtgagccaccgcgcccagtaagtatcagtgaaattctaacatatatctgaacagtaaaataccaccaataggctgaaagacttcatgggaggtaaatattcaataaacaggtgaaaaaagaaatacaaatggagcttgcttagattatttttctaattgctatgtctaacttgggaagtgaggaactgtttttggtcagcataatttaccatcagaatttagctatttactaatgaaaagaaatactaatctaggtttgttttagattaaggacagtcatgacctaaatgtcatttaaaccagagtgcattgtggcttgatcagtggtcatttctgtctctagaaagttgctttaacttctctgcctctacgtgtctcttgacattcagatatgaggtggggtagaggtggtgaccaactttccagacgcctgagtccaaaccttcttagcttatggttttcttaggtgatgtgcaaatcaacaaatatatacttttttttttttttttttgagttggagttgcactctatcacccaggctggagtgcagtggcatgatcgtggctcactgcaacctcctcctcccgggttcaagtgattctcgcacctcagcctcctgagtagctgggattacaggtgcccgccactacgcccggctaatttttgtatttttagtagagataaggtttcactatattgaccaggctggtctcaaactcctgacctcaagagatctgcccacctcagcctcccaaagtgctgggattacaggcgtgaaccaccttgcctggccaacatatatataccttttgcaactttgtcagagttgctatgaagaataagttgtatcttgttcacagaaattgcagtctactgggggagctgataaatgttttaaccatccaatgtaacatgttgtcatcaaagagatggtgagactttacacttgtgctaacaaggtagctgttctacataaaagaacatacagtacagatgtagaacttttctgttatcatagaacgttctattggacagtgctaggctgaatgctacagatcttcagagaaaggagaggttatgaggcctggagttgtctagaaagtctttttgccaaagagggatttcaactgggtcccaaataatgggtggaatttgataggtgtaaagaatttgcggtggtttatgcctgtaatcccagcactttgggaggctgaggcaggaggattgcttgagcccaggagtttgagaccagcttgggcaacgtggtaaaactccctctcccctaaaaataaaaaaaattagccaggcctggtggcgtggacctgtagtcccagctactggtgagactaaggtgggaggatcacccaagccccgggggttaaggctgcagtgagccgtgatcccgccaccgcactccagcctgggtgacagagtgagaccctgtctccaaaaaaaaaaaaaattcctggtagcccggtagactaggagggtaagtaggggagaagtgattacttacaaaagacattgaatacaggaccaaggaatttcagttctgttcttttgtaggggaagcttttaaaactttcggggcgccgggcgcggtggctcacgcctgtaatcccagcactttgggaggcccagacgcgcggatcacgaggccaggagatcgagaccatcctggctaacacggtgaaaccccatctctactaaaaatacaaaaaaaagtagccgggcgttgtggcgggcgtctgtagtcccagctactcgggaggctgaggcaggagaagagcgtgaactcgggaggcggagcttgcagtgagccgatatcgcaccactgcactccagcctgggcgacagagcgagactccgtctcaaaaaaaaaaaaaataaataaataaataaataaataaaactttggagccgaagcactgatgtttaatcatagagtgcttactatgtgttaggcacaggcctgattgcctgatgctggttaatttgtacaaagtaaatcagtgcatatgccctctgccctaggggagttattaactggagtctgacattgtacaaaggtaggtatcctgactagtttgatttggtactttgggtgaaaaaagtatagtgtgcttaagtgcagaagtgttttttgaggatttttgattggatacaaaccaccactcatattttatgtctttggcacttaaaaatttcaccataacttttgagtcatttataaaaaccactgaaagagtacttgagggacatccccgaatcctgaagaacttctggtgttctggagcagcctcagtgagatccaggaggatggcattgctgggctggcccagcccttattgattatggtgtaaagaattaatatggtggttatatactctttgttagacaccttggcttacaagacgtaagcgtaaagtgtagtgcgctttagtcagtatggccacatggtcctttggtggtaaattgtttgagatgcctccagtttttaaaaggagtagcatatcgggccaggagcagtggctcatgcctataatcccagcactttggaaggccgaggcaagaggattgcttgagcccaggagttcaagaccagcctgggcaacatagtgagaccactttgtttctttaaaaaaaaaaaaaaggcaaaaacaggctgggcatggtggctgatgcctgtaatcccagcgctttgtgaggcagaggtgagcggatcacttgaggtcaggagtttgagaccagcctggccaacatggtaaaaccccgtctctactaaaaatacaaaaattagccaggtgtggtggcacacgcctgtagttccagctactctggaggctgagccaggagaattgcttgaacctgggaggtggaggctgcagtgagccaagatcctgccactgcactccagactgggggacagagtgagacattctgacagtgctacactgaatgctacatgtcttcagaggaaggagaggttatgaggcctgggaataacatatggaagaatgaatttctgttatggtcagttctcatttgtcatgttaggattactgcaactcttacccagccgggtgtggtggctcatgcctgtaattccagcactttgggaggctgtgggcggatcacgaggtcaggagatcgagaccatcctggctaacacggtgaaactccgcctctactaaaaatacaaaaaattagcccagcgtggtggcagacgcctgtagtcccagctactcaggaggctgaggcaggagaatggcatgagtcctggaggcggagcttgcagtgagctgagatcgtgccactgcactccagcctgggcaacagagtgggactccatctcaaaaaaaaaagaaaaaaaaaaggattaccgcaactctttaattcagatcagcaaacatgttgagagccaggtattgcgtcaggcaggatccaaggataatgaaatattgtccgttttcatgaaactggagatgttgcagggaccgaggtgtgtgctatgccagtatggaagtaggacaggggagacgacagggcagtgagtggttcaagactctggctctgaagtcaaacagatctgggactgaatcctggatctgccacttcctagtcagaatctgagcctctattttcttatctgtaaaagaagattataacagtgcttatcttgtaggtactgttgacgattcaataagataatgtggataaaatgcttagcatagtgcctggcacatagtaagagctcggtaaatctaagttcttactaaatatccaagaaaagagattaattcttttcaggagtgagagaaagtcatcattattgaggggctttatcagatgggaacacctgaatagggttttataggatgaataggaattctttccacgaagttgcgttacaaaaagttgcattcaaggctgaaggaacatgagggtgcagaggcttaaaacagccttgtgtgttcagggagctataagtagaagttcttaatttaggagaactaaaccaaggggaaaggaggccaaggaaccacagttcttatcccttttctgttaataattgggtttaaatgtcattaaaataagttattttgtcctttttagaaaagtaataacatgctattataaaaaaaaagacttgtaggaatataaaatgtgtgttttacatgtatcctgttaattgacttgcttttattcagattttttgcagccctttctgtttaccaggttatcttggagacatatttattccaaattcctttttttttttttttttgagatggagtctcgctctgtcgcccaggctggagtgcagtggcgctatcttggctcattgcaagctccgcctcccgggttcacgccactctcctgcctcagcctcccgagtagctgggactacaggcgcccgccaccacgcccagctaatgtttttttttttatatttttagtagcgacagggtttcaccgtgttagccaggatggtctcaatctcctcacattgtgatccgcctgcctcggcctcccaaagtgctgggattacaggcgtgagccagcacgcctggccttccaaattccttttaacagcctagcaaaagaataataaggaaggtaaatctgcccctacaagaaaataatgcttcgacgatccggctttccttcctgctacccccagccataagaataaatgaccttgctcatcactgaaattttacctgacctttgaatttttaactgcgtcagccaaagaacttatattttgagtattcctaaggtgattgctattgtagttttgaaacacttggttggtatgtttgagggtttcatggtccaaagttactatagcagttaaaagagtggactatcaggtcagacctattgggctttaatcccagttctgccttctcttagaccttgggcctgttgttttcacttctctggttttcagtttctctgtccacaattgtggaaacgaggtccacttgtagagtaattgagaggatgaagcaagatgatgcatatcaagtactttgcatagtgccgggcagacaggtaacattcaagtgctaataattactattattactatttattttttgagacaggttctcactctgtcacctaggctggagtgcagcggtgagatcacagctcatgacagccttgacctcctaggctcaagtgatcctcctgcctcagccttcggggtagctggggctacaggtgtgtgctaccaccctcagctaattttctaatttttttgagtcaggatctcgtcacgttgcctaggctgaattactcttattaaaaactataatatcaggccgagtgcggtggctcacgcctgtaatcccagcactttgggaggccaaggcgggtggatcacctgaggtcaggagttcaagaccagcctgcccaacagagtgagaccccccccgtctctactaaaaatataaaaattagccagttgtggtggtgggcacctgtaatcccagctactcgggaggctgaggcaggataatcgcttgaacccgggaggcggaggttgcggtgaaccgagatcgtgccactgcactacagcctgggtgacagagtgagactctgtctcaaaaaaaccgaaaaacaaaaagcataattagggtggtaacgcttatacataggggcaggtggaataaaacataattaggaggtcgggcatggtggctcacgcctgtaattccagcactttgggaggccgaggcgggtcaggagttcaagaccagcctgcccaacatagtgagaccccgtctctactaaaaatataaaatttagcctgttgtggtggcgggtgcctgtagtcccagctacccgggaggctgaggcaggagaattgcttttgaacccaggaggtgggggttgcagtgagctgagatcgcgccgctgcactccagcctgggagacagagcaagactccgtcacaaaaacaaaaaacaaaaaactgtcatatcaaaaactaaactaaaatggtaatatctgttagatattacaaagtcaggcaaattatgattcatggcagccactaatgacccaaaggagagaaagaataattagcagattctaacctaatgggaaaaaaactaaatgaatagggatgggggacttacattctgttagaggaaattgaggctgtcatataaaaggaataggtaaggcaaactgtaaattcctgtttacacaaatgcccttctgataaatctctgcattgcccacagtccatgattacctctcccttattttaagtaatatttaacacattaaaaatggattaccacccaaggaattgctcccgacccagaaagtgcaggtagtgttgaaggtttgaggggaagaggaatgattagagttggttgtgtctcaggaagaagccaacaggaggaaccttattttgagtcaggtaaagaaggtgggagtgaggaggcatcccggtggccaggtatgaagctgggagctgattgctgcacattactcagctgaattaaatgtgccctcacatctgtgtgtgtgcgtacatgcaaatgtacatgtgtatgagttagttggaggggtagacctttattttcctgtcctgtaactttcctttgcaaactaatctgtattcagaacagtgttgcagttaagaaccacccagcttgtccatgaaacaggttctctcaccccatctccccagttttagagaaggcaggaaagaaaaggcagtgcttttcttttttcctggccgtatgcggggcaggaagaagccagcagagcttgaaagagaaagtaaaccttctgggaaataaacggcttggcttccctattgtggaggaggagtgcaaattattagggggatgtttgggtagtttttgtagaagccatttctgaaaactgatttggattagtgaaggtaagcccaatttaggaaaaccctgcccagtctggtgtcagccacctgtttcccgctttgtttgattgatttgattagtttgtggtattctgacctctcatttttattacaagagttggaagatttgagtctgaacttgagcacctgcttcggtgaaagcttcctaaaatgcatgttttttcacattttttctcatgttcattttgttttgctttttagcaaacactttttctgacagaatctaaaagcattagacttttcttgttttccccttctctccccacaatgtaatcttgaaaacccaaatgttagctgtgtaaattacctctcccgtaaaccaaacaaagtgcaatattgcattgagttagcattgaaatagtcggcctttgaatttttttctacttgtggtttagacataataaatatttcatctcagactgactttctcgacaaatcagttttgcatttgggcctcttttcatcagtatgtttagggaaagcacatttattgaaacattaaccaaaatgaaacataattaggaggccgggagcgatggctcacgcctgtaatcccagcactttgggagaccaaggcatgtggattgcttgaggtcaggagttcaagaccatccttgccgacttggtgaaatcctgtttctactgaaaatacaaaaaactagctgggtgtggtgacgcgtgcctgtaatcccagctactctggaggctaaagcaagagaatcgcttgaacctgggaggcagaggttgcagtgagtcgagatcgtgccactgcactccagcctgggcaacagagactccgtctcaaacaaccaaaaaaacaaaaacaagcataattagggtggtaacgcttatacataggggcaggtggaataattgaagcattctggagccagaaataatcaactgattaagaataatctggctgggtgcggtggctcacgcctgtaatcccagctactcaggaggctgaggcaggagaatcgcttgaacctgggaggtggaggttgcagtgagccgagatcgcgccattgcactccagcctgggctatggagcaagactccatctcaaaaaaaaaaaaaaaaaaaatcctgtttctgcagaaatatcccaggtgtcctgggtcagcagtgccccatagattccacggacgtttaccctaagttttccaatgggagttcatacctctatacccagtgagaatattttctgagtaatgggaatgagattggagatgtagggtagagaagatccatacagtctttgggttaaactttttcctctttgcctaggaaagattaatgctaatcttaaccacagatttgtagtaagaatgtatcagttttgtcattcagttctagactccagttttctttattgtaataccaatattttagagtaaattttgaaatgaatcagtacaaaagatatgtagtaagtggaaagttagtccgcaccttatccttgggactctttcccagggacagctagttacctactatttatctctcctgagttacttcatatgtatgcatgcaaacatgttattctctgggtgttgttccttccatatatagcagcaaatacaccaaactctgtattttgctttttgtcactttatcttagagaatactcaatgcaaatacatgtgtatatacctcatgtttaaaaaatctacatagtaaaattagccaggcatggtagtgtgtgcctgtaatcccagctactcgggaggctgtggtgggagaatcacttgaaccctgagatcacaccactggactccagcctgggccacagagcaagattctgtctcaaaaaacaaaaacaaaaacaaaaaaactacagagtagtattctaggctatgcatatcataaatttgatttcctaatgataggcatagatgatttgcctgggcggcaaattagcgttggctgtgtctcaggaagaagccaacaggaggaaccttattttgagtcaggttccaaagacagaaacattgtctgacatttgtttttgggcttatatgaataaatctgtacacatatatttttaatgttttaatcgtaatatgtatactatttggaaatgtggctttttagttaacagagtgcatgttttaccccattgcacttaaacattaacttggggataattaaatgagtctgtcacttggacaggcaggaattgtaccccccacaaacccataaaccgccaattttttttttttgagacagagcctcattctgttgcccaggctggagtgcagtggtgcgatctgggcccactgtaagctcagcctcccgggttcatgccattctcctgcctcagcctcccaagtagctgggactacaggcgcccgtcacaatgcccggctaattttttgtatttttagtagagtcggggtttcaccatgttagccaggatggtctctatctcctgaccttgtgatccgcccgctttggcctcccaaagtgctggaattacaggtgtgagccaccgcacctggccggtttttttttttttttttgagatggagtcttgctctgttgccaggctggagtgcaatggcatgatctccgctcactgcaacctccacctcccgggttcaagtgattctcctgcctcagcctcctgagtagctgggactacaggcgtgtgccaccacgcacagctaatttttgtaattttagtagagatggggtttcattaataatcattaatattagacaactgtcagactcacagtggtggatacaaactttctcaaattctgatttttactctaaagctcaaattttatcattggcaacaaatattgtcagttgctttccctgaacagacagcttcccttctttcatttttgagaaaatatctgccagtatcccagttggtttatcaatcattctttctctttttttttttgagacggagtctcactctgtcacccaggctggagtgcagtggcatgatctcggctcactgcaacctccacctcccaggttccagcaattctcctgcctcagcctcccgagtagctgggattacaggggctagcagccacacctggctaatttttgcatttttagtagagacagggttttaccatgttggccaggctgatcttgaactcctgacctcatgatatgcccaccttggcctcccaaagtgctgggattacaggtgtgagccattgcgcccggctctattatttcttttctttctttctttttcttttttttttttgagatggagtttcgctcttgttgcccaggctggagtgcaatggcgcgatctcggctcaccacaacctccgcctcccgaattcaagtgattctcttgcctaagcctcccgagtagctgggattacaggcatgtgccaccacacccgtctagttttgtatttttattagagatgggggtttctccatgttggtcaggctggtctcgaactcccaacctcaggagatctgcctgcctcagcctcccaaagtactgggattacagttttgagccacctgacccggtttgcttattatttcttttaaatttaaaaaataataaataaaggggccatgagagcgaagagtttgagaaaggttggtctaaaggttttaacataagaatccctgggttatttgcttaaaaagaagaaagaatctatggatctgcctgagagggtctgatgtagtttatctggggtcatcctcacaggcatagcagatattctgattcagatggtccttggtccttagtttgagaaatgtggctttacaaggcccatagaatataaagtcttctttggattagtgaagtcatgtccacagggtttagaaaatgtttttgttttagagataaaggtaagtggaagagtagacatgtagtgaatgagggaaaatgttttagagatttctttttattctgtttactcttcttggtatgcacgtacctgaatattaaggatattttatgaagtcatgacattaccagattaatgttggttttgttttaaggtactttctgactgctggggttaattcctacagacgattctggtaaagaatagcctttaagttttaaaagtgttgacttatttcagatgtcttaataaagttaacttccagttattacatgtaacgtatataaagctctcattttcctttattctcgttaattgtttgcataacaaattcaaagggaaatttgcttggcagagatcagatagcagagatgagatttaaaaacaggtaatttggctactagcctgggagtttgaagattccaagtttgcatccatgtgtagtcacttaacatttctgtccttatctgtaaatgggaataacacctacttgatagggttgttacattatcttggccacctcaggttctctttggctgagtgattgactggaaaacgcaatgtgaattcatgcttcagactgggttcttttttttttttttttttgagatggagtttcactcttattgcccaggctggagtgcaatggcacgatctcagctcactgcaacctctgcctcccaggttcaagcgattctcctgcctcaggctcccgagtagctgggattacaggcatgcaccaccatgcctggctaatttttttgtatttttagtagagacggggtttcactgtgttggtcagactggtttcaaactcctgacctcaggtgatccacctgcttcagtctcccaaagtgctgggattacaggcatgagccaccgcacccagcccaggctaggttctatatgggtgtgctttttagaatttagatcatgggctatccccaacacaaactggataatgtttctttctagattctctctaagcgtgtattctctttctttcctaggcacagccaccacttcacttacattgtgggattataatttcatgagtagtggaatttccttaaccttctcttgtgtgggagctgaaggacaaaatgagatattctctgaagagtggttacatcatgcaaaactatgatgtgtaatgaggtcacttagttttctaagtacattatacattttgataagattttcatagaaaagcttgtctccttggggagatcactcatcttccatcttgactattatttaaactttatgggtcagatttatctttttaaaaacttaaccataaagctcaattaattttttttttttttttttgagacggagtctcgctctgttgcccaggctggagtgtagtggcgcgatctcggctcactgcaagctctgcctcccaggttcatgccattctcctgcctcagcctcctgactagatgggactacaggcgcccgccacgatgcccggctaattttttgtatttttagtagagacggggtttcaccgtgttaggatggtctcgatctcctgacctcgtgatccacccgcctcggcctcccaaagtgctgggattacaagcgtgagccaccgcgcccggctcaattaatatattttaaaaattaatagactttattatttttattttattttatttttgaggcagagtctcgctctgtcacccaggctgagtgcagtggtgtgatcttggctcactgcaaactccacctcccgggctcaagtgattctcctgcctcagcctcctaagtagctaggattacaggtgcctgccaccatacccggctagtttttgtaattttagtagatacgtgttttctttcttttcttttcttttttttgagatggagtttcactctttttgcccaggctggagtgcaatggcatgatctcggctcactgcaacctccgcctcccaggttcaagtgattctcctgcctcagcctcccaagtagctgagattatagttgtctgccaccacgcctggctaattttttgtatgtttgatagagacagggtttcactatgttagccaggatgtctcgatctcttgacctcgtgatccgcctgccttggcctcccaaagtgctgggattacaggcgtgagccactgcggccagtctagactttattttttaaagcagtgttagttttacagaaaaattatgtggaaagtacagagagtttccatataccccttactttctcccacaacttctattattaacatcttgcattagtatagtacgtcccttacaactaatgaaccaactcgatacattattattaaccaaattcctgagtttattttatttctatttttattttattattattattttttagaggtagggtctcactgtgttgtccaggccaggttgcagtggcatcatcatagcttgctatagcctgaaactcctgggctcaagcaatcctcctgcctcagtctcccaaagtgttggaattacaggtgtgagccactctgtccagcctgaagtccatagtttacattacatttcactctgttgagcattctatggattttgacaaatgtgtgatgatgtatatttgccagtacacaattatataaaatagttttactgccctagaaaccccctgtgctccacctattcattcctctgctgaaccactggcaaccactgatcttttataatatctccatagttttgtcttttccagaatgtcatatagttggacatacagtgtgtagccttttcagattggcttctttcagtaaatgatatgcatttcaggtttcttcatgtttttttgtggcttgataggttgtttcttttcattggtgagtaatactctattgtatggatataccacatgttgtttatcaaacattcacctgaaggatagacatcttggttgcttccaagtttgagcagttatgaataaagctgctataaacattccagtgcaggacttttcacctcctctggataaatatcaaggagtgcaattgctagatcatatggtaagagtatgtttagttttgtaagaagctatcaaactatattcaaagtgactgtaccattatacattcccatcagcagtgagtgagagttcctgttactccacatcttcaccagcatttagtggtgtcagtgttttggattttagccattttaatgggtgtataatggtatacctattaaaattggttttttttggagacagagtttcacagtttcactcttgttgccctggctggagtgcaatggcgcaatctcggctcactgcagcctccgcctcccagtttcaagtgattctcctgcctcagcctcccaagtagctgggattacaggtgcacgccaccatgttctgctaatttttttgtattttagtagagatggggtttcactgtgttacccaggctggtcttgaactcctgagctcaggtaatccacctgcctcagcttcccaaagtgttaggattacaggcatgagccaccgcacctggcctcaatttttttttttttttttttgagacagagttttgctcctgttgaccaggctggagtgcagtggcacaatctcggctcactgcaacctccgcctcctgagttcaagcgattctcctgccacagcctcctgagtagctgggattataggcgcccgccactacgcctggctaattttttttttttttttaattagagacgaggtttctccatgttggtcaggctggtcttgaactccccgttctcaggtgatccgcctgcctcagcctcccaaagtgctgagattacaggtgtgagccaccgtgccccgcctgttttggcttttactgtgaagacgtgttagccgctgtgatgactagcaagtgtggccctccacccagtcgctctgggctcccagctcctgcatcctgctgcaaacttgacatcttccctcaagtaacttgtagttgtctcctgtctacttgcccaaaatataactcttaaacttttctctctgcaagtttgtgcctctctccctgtctgacttccccatctaaataaatggtagaccaccatctactcctttgtgcaagccagaaatctaggaatcatccttaaattccctgttctgtcttatctctgctttcattcaaagcatcagcaaatcctgttggttctacctctgaagttttctcaaatactgttacttgactcatcctgacttttgtttctgctttatgttaggctaaatgccctgaaaactcttttgtacaaaacacctagaaatactggataaactgggcttaacagggaggcccggtgtggtggctcacgcctgtaatcccagaactttgggaggccaaggtgggtggatcacctgaggtcaggagttccagaccagcctggccaatacgtagtgaaaccccacctctactaaaaaaaaaaaaaaaaattagctgggtgttgtggtgcacacctgtaggtggtgcatgcttgaacttgggaggcggaggttgcagcgagctgagatcgcgccactgcacttcagcctgggtgacagagcaggattctgtctcttaaaaaaaaaaacaaaaaaagaaaaacaggaaaatcttcagaagcaaaaaccaaacaatctcaccaaagaaatgagaagatggctgggcgcggtggctcacgcctgtaatcccagcactttgggaggccgaggcgggcagatcacccgagatgggcagatcacccgaggtcaggaattcgagaccagcctggccaatatggtgaaaccccgtctctgctaaaaatacaaaaattagccaggtgtggtggcaggcgcctgtaatcccagctactcaggaggctgaggcaggagaatcgcttgaacctgggaggcggaggttgcagtgagccgagatcatgccactgtactctagcctggacgacagagcaagactctgtctcaaaaaaaaaaaaggctgggtgtggtggctcatgcctataatcctagcactttgggaggccaaggtgggcggatcacttgaggccaggtgaacatggcgaaaccccatctctactaaaaatactaaagttagctgggcatggtggtgggtgcctgtaatcccagctactcgggaggcgaggcaggagaatcgcttgaaccaggaggtggaggttacagtgaaccgagatctcgccaccgcactctagtctgggcgacagagcaagactccgtctcaaaaaacaacaacaaaaaaccaacacatggccaaagtgcagtgacttacatctgtataatcccaatgttttgggaggctgaggcaggaggatcgcttgagtccaggaatttgagaccagcctgggcaacatagacctcatcaccaaaaaaaaaatattttttaattagctgggtttggcagcatgtacctgtagtcctagctactcaggaggctgaggtgggaggatcacttaggcccaggagtttgatagttcgaggttatagtgagctatgatcctgccactgcactccagcctgggccacagagtgagaccctgtctcttagaaacaaaacaaaacaaaaaaaagaaactgaattaaaaacaacaagaacaaaaatgctgctttttgttattgagttgtagcccaagtttcttgagggtaaagcattgaaaagcaggcagtaatagatttgctgtttaaagagatttacttgcagcactattcacaatagcaaagacatggaatcaacctaaatgcccatcagtgacaaattggataaagaaaatgtggtacatacactgtggaatactatgcagccataaaaaacaacgagatcatgtttttgtttgtttgtttgtttgtttgtttttgagatggagtcttgctctattgcccaggctggaatgcaggtggcacgatttcagctcactgcaacctccgcctcccaggttcaagcaattctctgcctcagcctcccgagtagctgggattacaggtgccctccaccatgcctggctaatttttgtatttctagtagagatggggtttcaccgtgttgggcaggctgttcttgaactcctgacctcatgatcctcccacctcggcctcccaaagtgccgggattacgtgtgagccaccgtgctcggctgagatcatgtttttgcaggaacatggatggagctggaggctattatccttagcaaagtaatgcaggaacagaaaaccgaagaccacgtgttctcacttataagtgggagctaaatgataaggacttgtgaacacaaagaaggaaaccacagatactggggtttacttgagggtggagagtgggaggagggagaggaacagaaaagataactattgggtattgggcttaatacttaatattttatcaaaataagctgtacaacaaacccctctgacatgagtttacctatataacaaacttgcacgtgtaaccccaaacctaaaataaaagttaaaaaaaaaaaaaaaggctggttgcattgggaggctgaggcaggcagagcacttgaggccaggaattcgagaccagcttggctaacgtggagaaaccctgtctctactaaaaattcaaaaattagccaggtgtggtggtgcatgcctgcagtcccagctaccagggaggctgaggcaggagaattgcttgaactcaggaggcagaggttgcagtgagctgagattgcaccactgcattccagcctgggcgacagggcgagaccttgtctcaaaaaacaaaacaaaacaaaacaaaaacctgtcactttgggaatatctcaaacctagtcatccaagtggttgtacgattttagtgtctgcatatcaatatttagtgtgatctactttcttagattctcaaatactgccaatgggcacatgtcatgaaataatgtcttttagaggacaagagagtgctaaagtctcattattgcagtttaagaaaaacaattctgtaacagtttaactttataggaaatgccttttgtttatttattttttttcttttgaggcttagatttttatttttatgtttttagagatggggtcttcctatgttacccaggctggccttgaattcctgggctcaagtgatcttcctgcttcagcctcctgagtagctgggactagacgtccactactgctcctggctggaagtttagattttaatttaaactcttctattgggaaactttgtatgtttgctttaccacttaacatttgcatgcattattgtacctattgtctcctacttaaggaagggcagtttatgctgttatatgaagtgaattaacctcctatggtacttcagttttctctatgctaaaagtgtgttctagatttttgaaaaacttacttaattttcattcatttattcaaatatttgagcattctgtagttgctggggaaatagcagtgaactgaagaatgtctttgttcttatggggcttaagttcctagttgatcatattggaaggagatacatgaaaaaagaaatatatgaacaatggagggcgatgagtactgtaaaggagaattcagcaggggagatgttgctgttttagatagaggggtgtcaagagacattgtgcagagacctgaacgaagtgagggagcaagccatggagatatctagggaaagagcctatcaggtggagagaagagtcctagggcagaaacgggcaaggtgtgttccaggagcagagaggggacagctgtgagcaaggggagagttgtagggaaggaggcaaagagagacatctggggcaaaatggattgactggtgggccgtggtaggactttggattttttcctgagtgggttttgagcaggggaatgaaatgatctgactctggttttttttttttttggagacaaaatcttgctctgttgccgaggctgaagtgcagtggcgcaatctcggctcattgcaacatctacttcctgggttcaagctatgctcctgcctcagcctcccgagtagctaggattacaggcttgggccaccatgccggcgaatttctgtttttatttttattttttatttatttttatgtttatgttttttgagacggagtctcgctgtgtcacccaggctggagtgcagtggcgcgatctcagctcactgcaacctctgcctccccggttcaagcaacttctcctgcctcagcctcccgagtagctgagattacaggcgcctgccactacacctggctaatttttgtatttttagtagaaacgggatttcaccttgttggccaggctggtctcgaactcctgaccttaatttatctgctcgccttggcctcccaaagtgctgggatgacaggtttgagccaccgtgccagccaggactcttattttgaaaggatctgtaatgtggagaatagaaggtagagggacaaggatgaaagcatccaggccagttagcctagtccagctatctaggtaagagatgctggtggcctggattaaggctgcgtcagtgggaggttgtgagaaaggctcaccttccttttttttttttttttttttttttgagacaggatcttactctgtctcccaggctggagtgcagtggtgcaatctcagcttactacaacctccgcctcctgggctcaagtgatacccccacctcagcctcccaagtagctgggatcacaggcttgcgccactatatccggctaatttttgtatatttcgtagagacagggttttgccatgttgcctaggctggtctcaaactcctgagctcaagtgatccacccgcctcagcctcctaaagtgctgggattataggcctgagccattgtgcccggtcacttccagattttgaagacagagccaacaggatttgttaatggattaggtgtggcaggaggagggggaggaagagagagagagactggagttgaagttaaggctcatttcaaggtttttagcctcaacatgtgcaggaatggagttgtcacttgctagaatgggggagactggaggagaagccggctgggagaggtttttaatgaaggggttggctttggatacattaagtttgacatgcattttagacatccaggtggagatattgaagaggcagttggctataagtgtctgatgttcatattagcggatggggctagagacataaatttgagaattgtcagtgtataaacgttgttttgaaagaaagtggggctgaataatttagaaaggagtgcatagagaaaataagtttactattaaaatagctttaacaggccgggcacggtggctcatgcctgtaatcccagcactttgggaggctggggtgggcagatcaaaaggtcaggagtttgagaccagcctggccaatatggtgaaaccctgtctctactgaaaatacaaaaattagccaggcgttgtaccgggcacctgtagtcccagctacttgggaggttgaggcaggagaatcacttcaacccgggaggtggaggttgcagtgagccaagatcacgccactgcactccatcctgggcaacagagcaagactccgtctcaaaaaaaaaaacaaaaaaaaacaaaaaaaaaaaactttaacagcaaagcctcttcctttaaaattatgaatttttttcttatggaagttggactctttcattattaagtctacattcaatcactatgttagtaaaaatgttgttctagttgccgaatgcaataaaccagctcagacttagtggcctaaagcagcaatcatttgactatgttcgaagatgccgtgggcaggaatttagataacagcagggatggcttgtctttgctctgcgatgtctgaggtctcactgagaaaactcaagcggctgggggtaataatcatctggaattttctttactcctgtatctgatgtctgggctgcgatgactcaaaggctgatttcagctgagactgtagaccacgtgcctacttgtggcctccccttttgccttgggtttctcacagaatgtggctggttctggagaatgagacttccaatgaaatcaggtggaaatgacatctcgccgctttcagcatgctctattggttggaacagttatggacttagctagattcaaaggaagggaacaaagaccccctcctctcagagagtggggcataatgagagaatttagggccatgttatccaaccaccacaaatgccttctgaatttgaggttctgcctcaaaagttcatagttcctttgactgaaggacttctatatatccaagcatcgtcagccccaggtatattgttccatgtaagtgaccaggactaccttagtatttcgtatagggaaagtgacctgaataaatttgagaaaagaatcttccttctctccagtaagcactgaggtaagcattgagccatattataggtttatgactttgagactcagaaatttaaattcttggccaggcgcagtggctcacgcctgtaaccccaacactttgggaggccaaggcaggcagatcacttgaggtcaggagtttgagaccaacctggccaaaatggtgaaactccatctctacgaaaaatacaaaaattagccaggtgtggtggcgggcacctgtaatcccagctacttgggaggctgaggtaagagaatggcttaagttctctttatctgctttatttcagttgcctctcttagatgaatattaatgacttacatagcattttagatcagtggatgtttttgtgattcttttatttgagctttggccaaagataacagtacccacaggttttttccagctactcgctcttctcccttcagtggccctcgagcctggaaaatctgacatgacaatgtgcttgctcaacctaccactgtttttcttttgaaaagtttggcagcctgtttctgactcctatgaaggtgaattcctcagcattcacagtttattagaaaaatactttgcttctctccaaactcgaaattcaagataaccaaacctatatataggctgatctttcaggatgcagttgtcatgttgatgccatgcttttcagtatcgtggccatcatctgttcagtaggggaggtgtacttctgtaatgggaggtggtggttatgtgtgtgtgcaagtgtttatttggtgtcttaagttagcctgtgggaagttctaaatcaggatggtacgtggttgccagcagagagctgctcctcaagtgaaggaggtagaatcaaagccaataggaaagagcctcagatgcttatatatgtaccgtggggattcagagtgaaagcagtcattggactaggggtggggttagggagagcctgtctgacagacacaagaaagggatggataacgccacccagagaaaaaagcattttaggcaagaacaaatatgaaaaaggaacaaagtctgtgggtggggggcaaggaggagataagttgacttgaaggaagacaacacttatgaaagtcacctggaggctgggtgccatggctcatgcctataatcgcagcactttgggaggccgaggtaggaggacaacttgagcccaggagttcgagaccatcctgggcaacatggtgagactgagtctctaccaaaaaaaaaaaaaaaagaaaattatccagacatggtggcatgtgcctgtaatcccagttactcaggaggctgaggtgggagggttgcttgagcccaggaggttgaggctgcagtgagctgtgatcgtattattgcactccagcctgggtaacagagcaagaccctgtctcaaaaaatgaaagtcatctgtaggctggagagaggaactggaaggggctaaagttggctgagtagttacagagcctgagataagggtaaagattttgcattggacaatgagatgttagtgtgtgtttttgagctggggagtgctgtgattttactcttattgaagaatcactgaaggattattcttgaatcagtgattcttgatcattcttgaatttttcaaacagcaaaactggaagagttggcctattcctcagaatattttctaattgggcgcagtgtcctcacttgggagaacctggctacacactttagttgtaattcactccagtcgttcattcattcaatacctattttttcagcacctattatgagccagacactatgctggatgccagggttcagggtaggacacgctagtgagcaaaagccaagactcttcttgtcttcatggggctttcagtccagcatagtggttatgagtccaagttaatggagtcacagtacttgggtgcaagtcatggtgatggtgatagaaggaaggcatgtgtgagggccagtggcaggcaggagcctggtgtttttgaggacctgaagaaggagcagagtgagtgccaggaacttagccaccagctggtaccagccatacgagaggggcagagccagccaggatgtcggtcatgctagtaatgagtacaaacacttacatgctgcacgctattgggctcctgagtgctacgtgttcattagctcgatgaatttgtacagcaaccctgtgaggtaagcactgttctctcccctttctatagatgaggaaattaaggcacaaagaggataaataactggcaccagctacacgctaagtgatcgaagtggtggaaccaggattcaaatccatgctattctgccttaagataacaaatcttgttttttagcctaagaacagagcagtcatcaggagggttttaagtaggggtgtggcaagatcaagtttgtgtcttgaaaaggtctctctacccacagtgtggaaaatggcctggaggcaagcacacagatgttgggagacagttaacagctcttgccatggccccctatgcattttggctctgatgtttctgcctgatttttctcttgcctctgcctcttttcctgaggggatggcaggttttaccattcagctggagtacaaaccctgaaccctttttggttaaatatctacttgcttttcctacagtattattttgagttgctgtggctgtaatgtcttgagggaatcgagcttgacagtaatttatagaacaaacagtttttagagactgtgtggcccaattgccctctcaatgttggcactcctgccatgacatttaccatgctgagcatgtgaccgccatctgaataccaaatgccacaggaacctgggaggttgtcacttactcctccctttctctgagtcacctttgcccttcagtcagtcaccaagtcccatcacatgtagctctgtaatgtcacagaagatggatgtctgcctcaaaacacttacaatgctgctacctaaattgggcagccacgacctcccaccaggattattgcagcctgagggatctttttgaaatgtaaatcaaactatcacttgtctgtttaaagcttttcaaagacttaccccattgcccttggaagaaagtgcagatatcttgacaggagagccttctccagcctcctcttctgccgtggtctccttgtacagtctctacagtgtactgcttcattagaaccctggagattattatttgctagttctgggctaagaactggcacctggctttgtagagctcctcaggagattctgaggcgtattcagagttgagccctgatctctgctctgatttcgaggttctcgttatatttattaatgatcacgaaaaaatttattattattctttggcctcactttagcatcatctgaggaatttttttttttttttgacagagttttgctcttgttgcccaggctggagtgcaatggcgtgatctcagctcactgcaacctccgcctcccgggttcaagagattctcctgcctcagcctcccaagtagctgaaattacaggcatccaccaccatgcctgctaatgtttttgtattttttagtagaggtgggctttcacagtgttggtcaggctggttttgaactcctgacgtcagctgatccacccacctaggccccccagagtgctgggattacaggtgtgagccaccgtgcccagccgtagctttcgaaatttgaaacctggtcccactgtcagaggttccaatttggcactggtttggttcccaggcatctttcttgctgtatatattttttagtgtcagccagggtggagacctctgtattacttcatggggaagaatttgggagaagatgttgtgaggagacaggttctagtcctagagtgatttatcctttctcgtacagatttccaggtatttgaggggccactcttctgtaattcatgtttttctctcctaacctcactcctgttgcctgcatcttcttgctgagcaaaatattcaaggtcttcaactcctcacaccctggttgtccctccctggatgtgtttggttgttttagtgttccatttcaattttgatacacagaattagaatagcatccagatgtgggtctgttacagctagactactagatccttcaaaatccaagtactagtatgtctattaaaataccataagatcacattggctagttacaatggttggtttgtgggttacttaaaaatcaactaaaattctttttttttttttgagatggagttttgctcttgttgcctaggctggaatgcaatgacacaatcttggctcactgccacctctgcctcccaggttcaagcaattcccctgccttagcctcctgagtagctgggattacaggcatgtgccaccatggccagctaattctgtatttttagtagagatgaggtttttccatgttggtcaggctggtctcgaactcccgacctcaggtgatccacctgcctcagcctcccaaagtgctgggattacaggcgtgagccactgagcctggccaaaattcccactttctaatactcctgtagtagctgggtacggtgggtcacatctgtaatcccagcacttttggaggctgaggctggaggatcgcttgagcctaggagttcgagaccagcctgggcaagatggccagacgccatctctaatttaaaaaaaagaaaaaacaagactcctatagtggtgaagaacagacattccgaaaacagactgtgcgttatgattccagctccatgcctttactacctgtgttgtgactttggataaatcacttaaaaatcttttttttttttttttttttttgagacggagtcttgctctgccgcccaggctggagtgcagtggcgcgatctcggctcactgcaagctctgcctcccaggttcacaccattctcctgcctcagcctcccaagtagctgggactgcaggtgcccgccactacacctggctaattttttgtatttttagtagagacggggtttcaccgtgttagccaggatggtctcgatctcctgtcctcgtgatccacccgcctcagcctctcaaagtgttgggattacaggcgtgagccaccgcacccggccaaatcacttaaaattctgtgcctcagtttctcctctgtaaagtgggataaaaatagtacctatctgatagggttgttacaattatgaaatgagcaaataagtatgtcaagtgtttaaaacagcgcctggcttcttgtaaaaagtgctatataaatcatagctataatcattacttatttcgactgctctttaaccaaggttcttatttttcatctttttcttttgttttgaatatcacttagtgttttcaccttttactctttttaggacctagagccatcctaggtgaaatacgtatggagatatttgatcaggtcaccacccagctctcctgacctcccttctctccttaaattaacatgccaaatcacagcatcactgactccttccctcccgatatgataagagtgtgcattgaaatgcatgtattttacttagcagggaaagctgattagtgattatcacacttaacccctagtgaatctgatggattaacctgctttccaggacactaaggaaatgggtttaagataagaaatatctggctgggtgcggtggctttacgcctgtaatcccagcactttgggaggccgaggtgggcagatcacgaggtcaggtgattgagatcatcctggctaacacgatgaaaccccctctttactaaaaatacaaaaaattagccgggtgtggtggcgggcgcctggagtcccagctactcgggaggctgaggcaagagaatggtgtgaacccaggaggcagagcttgcagtgagctgagattgtgcccaccgcattccagcctgggcaacagagtgagactacatctcaaaaaaaaaaaaaaaaaaagtaagaaatgtccatgaaagggagaccctgggggaaaggaacaataactgcagctctgaggatctggcaccagcagcaccagcacagagggatgctgtacaaccattattgattttaactttacaacagttcttcaaaggagagagagttccctgttttactgaagagaaagcccatttggtagtgaaataccattcccaaagacaaatagctaataaatgtcaggcagggttttgcacccaggcccatccagctcccgtctctactgtcctttcccccacaccacactgatacagaggaatgtgtctggttggggaagtggaagtgttcccaagtggggaggtcatctgatgcacaaatttggtctgttttgtgggttttcttgttttagttttagtttttgtagagctcagacctgttcttaggcagctttaacaatcaactgtgcactcagtaattgacaaatcatgtttgttacttttaatttagagggaattaggtttgttaagctcttgctccttctttagagatggggtctagctctgtcacccaggctggagcgcagtggtatgatcacagctcactgcagtctcaatctgctcaagtgatcctcctgcctcagcctccatgggactacaagcatgggccaccatgctaggctaattttaaaaaaatttttttgtagaggcaaggtctcacggtgttgcccaggctggtcttgaactcctgagctcaagcaatccctcttccaccttggcctctcaaagtgctagaattataggcatgagccaccatgcctggcctttacttctttcatatattcaaattttgtcatattagtagggaactataactcaagttttcttatagattgatgttcatttttacaagcttgatcgtcattggtttttaattttaaagcaaatcctgttatatgtaattgaacattacagtaattatagtaatttgtttcagattgggcactcaagtgttaatattttgtctctttaggaaatcaaaactagatttatatatagacttcttattgcaagtatctagtcttaaatcttacaaaggtactatttggacttaaaactatgaaattgtgtgcttactatataagtgtacttattttgagttatgttttaaacttgaaattccattcttaatgtctagagtaattatgaatggttaaattatgaatgactctaatagtttaaagctacagtatttatttatttatttatttaatttattttttgagatggagtttcgctcttgtcgcccaggctggagtgtagtggcaccatcttggttcactgcaacctctgcctcgcgggttcaagtgattctcctgcctcagcctcccaagtggctgggattacaggtgtatttcaccatgcctggctaatttttgtatttttagtagagacaggcttttgccatgttagcctggctggtctcgaactcctgacctcaggtgacctaccctcctcagcctcccaaggattacaagcatgagccaccacacctggcctacagtattttaatgtggactctctgtcatccattatgctgtttatcctgtggtgaaaattttatgaagattgaatgtttttctctagcgtgaattgctttctcttacttttctcatttttttccttcctaatctacttgcagatacttcagattatttttagaacgtggtatggtgagaacaaataaattggggtttccaaatcttaataaattatgtggccctcagtgggattagcagggttgtattgaaaacaccaatagaaacaaaatagttcttttatgcgctttaaataaaaatttcttttcaggccaggcgcagtggctcacacctgtaatcccagcaccctgggaggctgaggcaggcagatcacctcaggtcaggagtttaagacaagcctggccaacatggtgaagcgccgtctctactaaaaatacaaaaattagccgggtatgatggcgcatgcctgtaatcccagctactccagaggctgaggcatgagaatcacttgaactcaggagatggaggttgcagtgagctgagatggtgccactgcactctagcctgggcaacagagtgagattctgtctcaaacaacaacaacaacaataacaaaacatctcttttcaggccaggtactgtggctcacgcctgtaatcccagcactttgggaggccaaaacaggagggtcgcttgagaccaggagtttgagaccagcttgggcagctggtctctatttgaacaaacaaacaaacaaacacaatactcttttcatagaaaaatgtttactacacaataaactttaaaagaatatgcagctgtattaatgctatgactccaatgtaaaaaaaaaaaaatatatatatatatatacacacacacaaacacattctgaaatagatttaaaggaattacatcaacatgtcaatttttattttttcggagacagggtctcgctgtgtcacccaagctggagtacagtggtgcaatcacagctcactgcagccttgacttcctggcctcaagtgatcctcccccctcagcctcccaaagtgctggggtcacagaccaccacacctggcaacatgtcagtttttgttctgcatagtgggatggtgggatatggatgtttttatcttttattttcttttttatatttttctaaattttccacattgaacattattttataatctttcaaacatatctcttaaaaggactggttcctatagaattcagtgcaagaaatcttctgtgtttctttatactttggttgccttgatcactgggcctttcctgacagcaaagaagaggttagtgtaggcagcagataaaacacaggtatgctctatttaaaatgcatgtatttataataaaagtataggtggtacccaaaggaaaatgtcatgacacattgcaaagtggaacagaagttatctttagatcactttctgttctggattattgtatgagcctgattttcgtctctctttccgccttccctcaccctcgttgtaaatccactagtgcatggatgtgaagtacaagtcttaactttaaaaagttttatgaagctgtgtagtaaatcccttttgtaagtggtcttgactgcgtttctcaatatatcttttggtttcattagattcaagtatataaatgagaactgtaactttggacagactttttcagtcatctttacggtaataagttcccaattagacaatagttatttgttttatgacttgctgttggtaggttatccccaagggactgagaaattcctgttttgaaaagtccaaaaagtctttgatgacttgctgtttcatttttttcttttctcttcagttatagaaaacaggattacacccaccttgcctttgtacagtgcatctactatctgctgacttaacctgagtaaatgctttgaattgagccccatataatgtcctaaggcagcctatatggagtaatgaattgtcttctctcttatgcacccagagtggtagttggcactcaagttgttcctcagataactttgtgtgttctggggctcaatgaagtagttattaagtcacaggcttggggagaacattcatcctatggcattgaatgaagtgttgcccaattctagaatgtctaataaaatttttttaaaaacccacaggcttagaattattccgtagatatgaagtaatgtagttagaacttagtggagttctttagattaacttgtaatttgaaaaaccaaaattgaaattgtgaaataacatgggctctttgaggtcttttccagtaaaacagttacagtaaagctgcttggcagtgattttcctagacactttggctagtcatctcctgtgactgctgttaattaaatatggtttgtagctaagcagcctgtaaggagaagactatggaagtatttgcatattctctccttgaaaatactacctggtctttggctttaagttatacttttattttcccctgtagaataactattaaagtattacctatggtgattagactaagaagtaaaacatgaaatcagtcattgttggtgccctggtgccttcttttttttttttttgagacagagtctcactctgttgcccaggctggagtgcaatggcacgatcttggctcactgcaacctctgcctcccaggttcaagcgattctcctgcctcagcctcccaagtagctgagactacaggcgcccaccaccacgcctggctaatttttgaatttttagtagagacagggtttcactatattggctaggctggtctcaaactcctgaccttgtgatccgcccacctcagcctcccaaagtgctgggattataggtgttagccactgtgcccagcctggtgctttaattttatggaaaaaactactagctggtttctgttttaagaaataacacaggccgggtgccatgacttgcgcttgtactcccagcagtttgggaggccgaggcgggcggatcacgaggtcaggagtttgagaccagcctggccaacatagtgaaaccccgtctctactaaaaatacaaaaattagccgggcgtggtggggcatgcctgtagtcccagctactcgggaggctgaggcaggagaatcgcttgaacctgggaggtggaggctgcagtgagccaagatcgccccactgcacaccagcccgggtgacagtatttcatctcaaaaaaaaaaaaaaaaaaaagaacacaattattgtactacttactagccctcctctgtccccagctaaaaataagaacagcaacaaccaaaaaatccttagttatgtactggaaatgaattagataattttcaataacttacacgtttttaggatatgttagtttgaaaatgcaaatattcatgcatgaccccagtgttaatctatgatggagcaggtatagtgggatgctgtttcatgatttaatttggaccttcagggagtagactgtgatgcctctgcatttgtatccaagacaaataattaaatagtctatttttggctgggcatgatgcctcatgcctgcagtcccagcactttgggaggctgaggtgggaggatcgcttgaggccaggagttcaagatcagtctgggcaacaaaatgagaccttgtctctacaaaaactacaaaaaattagctgaacattgtggcttgtgcccctagtcccagctactcaggtccctgagttaggaggattgcttgagcccaggagttggaggttacagtgatctatatttgccactgcactccagcctgggtgacagagagagaccctgtctcaaaaaataaagtctgtttttaaaattaattttaaacactggagtttattacaaaaagcagttggttctttttttaaatcatttttttttaggagaaccaccgctttttggctacattgtctagagtagcagtgttcaataaaaataagatccaagtcacatatgtaatgttaagttttcttttagtttctttttcttttcttttcttttctcttctttctttctttctttcttttttttttttttgatatgcagtctcactctgttgcccaggctggagtgcagtggcacgatctcggcccactgcaacctccgcctcccgggttcaagcaattctcctgcctcagcctcccgagtagctgggactacaggcatgtgccaccatacccagctaatttttgtatttttagtagagatggagctttgccatgttggccagtctggtctcaaactcctgacctcgggtgatccacatgctttggcctccctaagtgctgggattacaggcatgagccaccatgccctaccaatgttaagttttctagtagccatattaaaagaagtaaaaagaaatgggtgaagttaattttaataatatattttatttaacccaatatatctaaaatattatcatttcaacatgaacaagatactttacattcttttgtttttcactaagtcctcaaaatccagtgtgtattttatattgacagcatagttcagtttgaagcagccacatttcaagtgctcagtagccacatgtggctagtgactccatactggactgtgtaggtttagagtttcagtaaatttgtatgcaatagaatctacataaattggcatattatgcagatttctttgtatgcacatcagttcttgcatagcataagtcaggtcatgatgcttttagtctatgaggcagatttttttttttttttttttgagacagagtctcacttggtcacccaggctggagtgtagatgcacaatcttggctcactgcaacctccatgtgaggcagattttaacttggccctaatgcaaatattgtaagagagatctaatggcctttgatttcttacagagggcaatcaatacatgccatggttacaatgcttcagcatatagtatgcacgtcagccactgcttttactctggctagtgcttagtgtacctgtaccactgcccaggcagcatttgtcctgtggcaggtgaatcttagggtggaaggtggcaagtaacattgcttttttttgagagggagtcttgctgtattgcccaggctggagtgcagtggtgcgatctcggctcactacaacctccacctcccgggttcaagtgattctcctgcctcagcctcctgagtagctgggattacagacggccaccaccatgctcggctaatttttgtatttttagtagagacggggtttcactatgttggccaggctggtctcgaactcctgacctcgtgatccacccgcctcggcctcccaaagttctgggattacaggtgtgagccaccgtgcccagcctacatttttaaattaattaattataagcaggatctcactgtgttggccagactggtcttgaactgataagagttcaagaccagcctaggcaacatggtaaaaccctgtctactaaaaaatacaaaaaaaaaaattagctgggcatggtggtgcgtgcctataatcccagctacttgggaggctgaggcaggaaaatcgcttgaacccgggagactgaagttgcagtgaggtgagattgcaccactgcactccagcctaggcgattccatctcaaaaacaataacaacaaaataacattgttggaatatttagttaatttatagaagcgtattggcctaattggggcaaataccttattctgacattctctctatttgctttactgagctttttcaccagtggaatttaagcccttgatacatgaggagggaaaataccttggagctgtgctgcacatgtaaagtacacaggagatttagaaaacttcgtagcaaaaaaaagagtgtaaagtatctcattaatagtttttgtgggctggacacggtggctcaagcctatactcttggcacattgggaggctgagatgcatgagtctaggagtttgagaccagcctgggcaacacagtaggaccccgtctctacaaaaataatcagccagatgtggtgcgcatctgtagtcccagttacttgagaggctgaggtgggaggatcgtttgagctgggaagttgaggctacagtgagctgtgattgaaccactgcactccagcctgggtgacagagtgcctgtctccaaaaaataaataaataaataataatatgttttgtatgttcatatgttgcaataacattttggatatattaaatgaaataaaatacattaaaattaatttcacctgtttcttttcttttcttttttttttttttttttgagatggagtctcgctatgtcatcaggctggagtgcagtggcacgatctcggctcactgcaacctcctcctcctgggttcaagcgattcttctgcctcagcctccctagtagctgggattaaaggcatgtgccaccacacccagctaatttttgtatttttagtagagacggggtttcaccatattggccaggatggtctcgatctcctgacctcatgatccgcctgccttggcctcccaaagttctgggattacaggcgtgagccactgcacccagcctcttttaactttttaagtatggctaccagaaaatttaaaatgcatgtgtggcctgtattctatttctgttggatgctgctgccttagattattaattattcaatgtaaagactgctgggaggtactacctgcacttccctgaatatatgcttgagagctccaccagccgtcttcacagtagcaagaggggtattctgagtctgtcccccaaagagggagggagaagtgcagccctctcaggttctgtcagaaaacctgatcccaggccaggcgtggtagcttacgcctgtaatcccagcactttgggaggttgaggcaggaggattgcttaagcccaggagttcgagaccagcctgggcaacacagtgaagaccctatctctacaaaaatttttttaaaaaaattagccaggtgcagcaatgctgcctgtactcccagctgcttgggaggctgaggtaggaggattgcctgagcccaggagttagaggttgcaggagttagaggttccacgatcgcacctttcattccgttacatttgctgccttgagaacagaagacctgctggttttgttgccagtttgctcagtcatttttatgaaaaagccagtgctaactaggtgcttcttcgtgccttctctgagaatcaagaactctagtatgtttgcgtgtgttcagtctctcattaaatgttctcactatcccagagaaccatctcattggaccttggtctgtacataccttcatctttggctctgacttgtaattatttttagaacttctctttttttttttttggagacagagttttgctctagttgccagactggaatgcagtggcacgatctcagctcacctcaacctctgccttccaggttcaagcaattctcctgcctcaacctcttgagtagctgtaattacaggcatgtgccaccacgcctggctaattttgtgtttttagtagagacagggtttctccaagttggtcaggctggtctcaaactcccgacctcaggtgatctgcccgccttggcctcccaaagtgctgggattacaggcgtaagccactgcgcctggcctaattttagaacttgttaaaacaacttggcctctattgatatttccatgacccatgctattcagaaagaggattacaggtaattagctggctgggtttctcataccagagcatttcactgggatgttcctgaacctgggacaacttttatgcctggcatttttctttccttctctgttgtcccagactaagcaatttttaaaatagttattatttgttgagtaggagaatctcaggcagatcttcctggatcctcatttatacttttaaacctgtagtcttggaattagtgctctgtcccccaaccccaaacatccaatttctacattttggctacagtacaggtttactgtgtataactaaaagggctgtggaggagaaagaaaggaaccgacatttgttgggcatctgttatgtgccatgcactgagctggatgctgtaggaatatctcaatacctctgaggagtgggaattattatctctattttatagacaagggaatagaaatctgggagttaagtaattttttaatttcacacacttctggtagataatggattctagaacctggcataatagccacttgtcatcccagtgtaaaagagatgtgtggccagatggggtggctcacatatgtaatcccagcactttgggaagccgaggcaggaggatgacttgagcccaggagttcaagaccagcctgggcatgttttgtttgtctcacgaaacattttttaaaaaatgagtgtggcatggtgttgtgtgcctatagtcccagctcctcgggaggctgaggtgggaggatctcttgagcccatgatcatgccattgcactctagcctgggccacagagcaagactctgtcttcaaaaaataataaaaaggagctgtgattatcccaaggtggggattgtgaatgtgtttgtattgttctaaactgggagaaacaggctgggtgtgttggcttatgcctgtaatctcagcactttgggaggccaaggtgggaggatcacttgagtccaggagttcaaggccaccctgggcaacaggcaaaaaatagagaccccatctctattttttaaaaataaaataaactgggagaaagaagcagggtcctccccagagcatctttatccctagtcacagacctgacacctgtgttgggcaatggctacttctagattgtttacccctactgggacttgtggtgaacatatgcacactttggtttacagttgggacccctgattttagcaggatggcccaatggaatcagctacagcagcttgacacacggtacctggagcagctccatcagctctacagtgacagcttcccaatggagctgcggcagtttctggccccttggattgagagtcaagattggtaagtccttcttaagtgactctccaaattgttaggtttcagtttgagtcaagagacatgaactcttaatgtcatgccttgctgttccattaaaaaatgtatgggtacaggtgatggggaaaatgagatcaggagataaaggggcaccctttggtcttgtaaagccttttttatcttagaagggcatgtgggcaactgtctttgacacattgaaaccgcctgtatggtggtggatgtcttgaaggttgatttggacctcatttacttgggcagatcctctatatattctgataatccagtgatgtggtagacatattttttctctgaatgtgaattctgtcatagctagaactttgggttgatacttgtaattcccctttagttaaaggaaggagccacaggggtgtattagtctgttctcaatttgctataaagaaatacctgagactgggtaatttataagaaaagaggtttaatcggctcatagttctgcaggctatataggaagcatagcagcatctgctgctggggaggcctcagcaagcttccaatcatggcggaaggcagagagggagcaggcaggtcacatggccacagcaagagcaagagagcaagggggaggtgccacacacttttaaactatcagatctcacaagaactcactgtctcgaggacagtatcaacagggatggtattaaaccattcatgagaaacccacccccatgatccagtcaccttccaccaggccccacctcaaacagtgggggttacatttcagtatgagatttgggcagggatgtagatccaaactagatcacaggataagggaagtagattccattcatagagcagataatggcacagatgtccagcaactattttcttcactttaatatgctcaggctcactactgattttggtttaattcaggccagtgttaatatgacctggtttttccagaatgcatactctgatttggtgaagggccaggaggtgattcacagatgttggagataggccatcccagcctgggattacttatttgtactaataaatctgaccagagttaattgagggtttaaagcaaaacagcatatctgtctactttgctcaaatattttacaaatacaacagattatgagagtgggtaataatatctggaataattgtttttttgttttgtggtttttttttttttttttttgagatggagtctggctgtagcccaggctggagtgcagtggtacagtctcggctcactgcacctctgcctcttggattcaagcgattctcccgcctcagcctcccgagtagctgggattacaggtgcccaccaccacacctggctaattttttatttttagtagagacagcgtttcaccatgttggccaggttggtctggaactcctgacctcaggtgatccgcctgcctcagcctcccaaagtgctgggattacaggcatgagccaccatgcctggcctggaataattgttaataattattacattgatggcattttattgctgagcaagaagaatctaacatgatgaatgggttatagcatcaggtttgctttgtttttttgtttttttcctctttcttgatggtgatttctgtgtttgtgtgtatgcgtcggcttcagagccattctttatcattcttccttttcctagggcatatgcggccagcaaagaatcacatgccactttggtgtttcataatctcctgggagagattgaccagcagtatagccgcttcctgcaagagtcgaatgttctctatcagcacaatctacgaagaatcaagcagtttcttcaggtatgatgagaaactgaggacaaggagaaacaggacccgcagagtcgggtgttagtgttctttcctggaagcatctcttttctcatttggctaagtaacgagaatctatcttgtattttcaatcacaggagaagtaattagccctttctcaaagctctgtatacttacccgtgagcatcattacctgagaatcacttctcttgtcacagttgaagtaataaagtgattgttatgttaatcatacatgttagcatgttaacgcggtccactgataggaagatgactctcactgttacatgttaaatgtttgaccataatgggatacttcttgactaagtcagtagcttccctgcaagaccaggatagtatactgtgtaaagactcagacaaggccaggcatggtggctcacgcctgtaatcccaacaccttaggaggttgaggtgggaggattgcttgagcctgggagttttgagaccagcttgggcaacataacaagacaccatctctacagaaattttttttaaaaactagctgattgtggtggcatgcacctgtagtcccagctactcagaaggctgaggtgagaaaattgtttgagcctgggaggtcgaagctgcaataagccgtgattgcgccactgcactccagcctggcggacagagtgagagccagtctcaaaaaaaaaaaaaaaagactcaggctaatgtgccttctgttacagaaatagtaacgacctccccttcgccccccgccgacagagagccttcacccaggctctgaagcctttgttccgttgtttcctagaataaatgctttccttgatgaatacattagttttaaggtgccacagttcagtccacatctccatggtctgctgctgatttttattctctttctctcctacttatagagcaggtatcttgagaagccaatggagattgcccggattgtggcccggtgcctgtgggaagaatcacgccttctacagactgcagccactgcggcccaggtgagacctgagacaaaacaaatccctggtctgggaggaatggaaaatcaaacaactttataatgagataaattattagatctactaaaaaagaaggaaaagaaattaaatagatcaataatcataaaaatacattgaaaaactctaaaaaaaaagaaagttccaccccccaaaatacattgaaaaactctaaaaaaaagaaagttccaccaaaagaatccaacagacccaatggtttaaaagttttgttttgttctgacaaattttctttgtttttctttttttttttttctgagacagagttttgctcttgttacccaggctagagtgcaatggcgcgatcttggctcactgcaacctccacctccagggttcaagtgattctcctgcctcagcctcaagagtagctgggattataggcgtgtgccaccacacccagctaattttgtatttttagtagagacggggtttcttcatgttggtcaggctggtctcgaactcctgacctcaggtgatccgcccgcctcagcctcccacagtgctgggattacaggcgtgagccactgtgcccggcctgttctgacaaactttcatagtacagattattccaatatcattcaaacttttccaaagtataggaaaacaagggatgttttcagcttattttatgaggctggaaaaatcctcatatcaaaacctaaaaaacagccaggtgtagtagctcacgcctgtaatcccagcactttgggaggctgagacgggcagattgcctgagcctcaggagttcgagaccagctggggcaatgtagcgagacctcatctctctttttttttttttttgagacagagtctctctctgtcgtccaggctggagtgcagtggtgccatcttagctcactgcaacctccgcctcccaggttcaagcgattctcttgcctcagcctcccgactagctgggactacaggtgtgtgccaccaagcctggctaattttttgtattttttttagtagagatggggtttcaccttgttaggcaggatggtcttgatctcctgacttcatgatccaccggccacagcctcccaaagtgctgggattataggcatgagccaccacgcccagccttttttttttttttgagacagagtcttgctctgttgccaggctggagtgcagtggcgtgatctcagctcactgcaacttctgcctcccaggttcaagctattcccctgcctcagcctcccaagtagctgggactacaggcgcgcgccaccacacccagctaattttttgtgtttttagtagagatggggtttcactgtgttagccaggatggtctcgatctcttgacctcgtgatccgcccgcctcggcctcccaaagtgctgggattacaggcgtgagcaaccgcacctggcttaattaaggatctttctaaacacaagaaagaatatttatcagaaaccaaagggagcatgatgcacagtggtgaaacactattctcagtaaaaacagcaaaagataaggatgtcttttaccattgatacttttctgagggatccagcctatgcaaaaagaaaaagaaatgagggtacaaatattggaaagcaagggacagaactcttattatttacagatagataggtcttcctcgaagatccaagagaaacaaaactaacaataacaattggaactagcaaggtttagaaaggccattgtatacaagataaatatttttagaatctgcagttcccctaatcagtagcagcagtaacctgttagaagatgtaatgaaagtaaagatctgggccaggcacgatgtctcacgcctgtaatccaagcactttgggaggccaaggtgggcagatcatgaggtcaagagattgagaccatcctggccaacatgatgaaaccccatctctactaaaaatacaaaaattagctgggtgtggtggtacgcgcctgtagtcccagctactcgggaagctggggcaggagaatcgcttgaacctgggaggcggaggttgtagtgaaccaagattgcgccactgcactcctgggcgacagagcgagactccgactgaaaaaaaaaaaaaaaaaaaaagaaagatctgattcatagtagtaaaactaaatgtatgcaatttgcatatactattggtatgtatgggaaaatatctggaaacacatatactaaatcattaaagtagtcggtcataggagacttttttactttctgtgaggggttttaccgtctttaatatcctataatcagggacattttttctttttctccgtgaccccctgctttttaaaaaattgtggtgaaatacacataacattacatttcaaatttacctttgtaacctttgttttttttttttttttttgagacagtctcactctgtcacccaggctggagtgcagtggtgtgatcacagctcactgcagcctcaaccacctgggccctagcgatcctcctgcctcagccttatgagtagctgggactacaggcacatgccaccatgcccagctaattttttttttttttttttttggtagagatgggctcttgccatgtttcccaggctggtgttgaactcctgggctcatcaactgatgagaaagagctctccaggcagaaagaagatcatgttcaaagacagaaacagaaatgtgtattcttgggagaagtgtagaaagttcagcatctgattgggtcggggaagacaagctagtcaaggccacatgatgttttaattagtcatgcctaacagtggggccctggaagagcagtttaccacaaggggccaactgcttcggtttgaacccgcagccctgccacttgctctgtaaccttaagtaaacaatttttactctctctgttcctccaatgggagtgataacaataccttcttcatagaattaattcatacatgtaaaatgcttagaacagtatctgacacataaatgcaaaataatttaactgctttctgctgctgctgacatcactatcatcaccctcaccattactgtaggaaatggggacccagtgaagaattttttttttttcttttgagacagagtctcactctgtcacccaggccggagtgcagtgacgcgatttcggcccactgcaacctctgcctctcaggttcaagcgattctcatgtctcagcttcccaagtagctgggattacaggcatgagccaccacactgggctaattttttgtatttttagtgagatagggtttcaccatattggccaggctggtctcaaactcctgacctcaggtgatccatccacctcggcctcccaaagtgctgggattacaggcataagccactgtgtccggccctagtgaggaattttaagcagaaaactgatatgctcaggtgtgagcgaggtggtaggtaacacttactgtgcagtgccctgtagcccaagaggttagcacacaggcatttgctcaggcagcactaggattttctgctgtggaaaacctttgtattttatcctgctccacaagataaaaataagtggtttaagtcaatttggatagaggctccaacttaccatgggaggtaggaaagccaaagttatcccaaggatgttttcaatcgtacggattaggggtctgcaaactgtgagcgtggcccaaatccagcctgctgcttgtttttgtaaatgaggttttttcggaacccagccacactcatttatttatgcattatctgtggctgctttggtgctgcagtggcagggctatttgtggcagggactgtatgacccaggaaaccaaaaatatttaccctctgtcccttagagaaaaagtttgcaacccctgatataaagctataagttggttatttgtggcctcaacccaggcctcactgctattttttctgtttacaatacctggcatgctcttaagtgtctagaattggttaaagatagaagagtggatgtaatccctgctaccaagggctgtcaggctagttgggattataagtacacaaacactcaaagtgagaaaaacacagaaaaggatgtgtgtcattttgtctaaggaagttgaataagatttctcaggaaaagaaacatttgaactgaatttgaaggtgagtgagttcaggtgtgtttgggctgaagcccaggccatgctgagtggatagcgggtgggaagagagtgtggaaacacactgcatgcagggaagagttgggagtctggggtgaccaaggcacagggagggaaagttgaagttatcaattgtgtgaaacagctttctgtgttggcctgagatgtttatagctggaagcagtggggagccaatacagttttttacgaaggtattagaggtgggtttctgtgggtgatcgttaatcatgttttctccctttaagtgtagtcctgcttgagaaatagacatgagaaaggaatgaaggttaaaacatcagctgtattgttggtaaaactagaatggaaagtgtggcttgagctggtaaccataggggctttccaatgcctgtgccctgagttagatcttggggtagagagactggatgtgcagagcagcacccccaccccaccccagccatccatatggagcttcagctgccatagaccaacaaggcagagggataggcctctagacctgcttctagaaaccaggctgctgctcttgcttatggtgggccctaggaaggcaagagtgagaggagggaggcaccagcttaggtgctgggttctttgaagatctgtgtgtacacagagtctttctctccatcttaccaatcagatgagtcactgtcactgtgggaagaagtaggggcatgggtcaccttcccaaaacttctaagaagtttgtattctgtgggcttggatagggaccatgggaaaggaagagaatggttgcccataaaactggctgtagtgtggcctcaaacttctggacttaaatgatcctcccacctcagcctcccaagtagctagaactacaggtatatgccaccatgcccagctagttaaaaaaaaatttttttttttttttggttgagatgaggtctctttctatgttccctgggccggtctcaaactcccagcctcaagtgatcctcctgccttggtttcccaaagtgctaggattataggtgggagctaccatgcctagcccaagcctgtaattttttttttttttttttgagatggagtttcacttttgttgctcaggctggagtgcatggcgcagtcttggctcaccacaacctccacctcccgggttcaggcgattctccttcctcagcctcccgagtagctgggattacaggcatgcaccaccaagctcagctaactttgtatttttagtagagatgggtttctccgtgtcggtcaggctggtctcaaactcctgacctcaggtaatctgcccaccttggcctcccaaagtgctgggattacaggcatcagccaccgcacctggcacgaacctgtaatttttaagtttcatatgctatttattttttgttatttctttaattcattcattcatttattcattcgagatggggcctcactatgttgactaggctagttttgaactcctggcctcaagcagtcctcccacttcagccttcccaagtgctgatattataggtgtgagctgctacatccagccttctttcttctttttctttttccatgtgctatttgacattttccaaggtaccagcctccccttctccccaagataatatcttttaatatggaatttcatccctagggcaggactttttttttattatccctcagaaatatactggacaccacgtttaagtagacatccaacatctgctgtcataaattgttttgaattttttgacatacttgcccatgaggtttttgaaggcatagaccatgtcttagctgaacatgtggtctcttagtgccataaagggggtttatggtatgacctgtgtagtgtcacctgtgtagtgacagcaccactgcctctgtttcccttcctcttgtgatggcagcagcgtctcaagccaaacaagaagggtagttagggtgggatggaagctgggtagaggtattcctctccccatagttctgtgttcacatgtgcattgacctcctttttggcagcaagggggccaggccaaccaccccacagcagccgtggtgacggagaagcagcagatgctggagcagcaccttcaggatgtccggaagagagtgcaggtgatgcaagttacaagcctcgggcagggagctttcattaatttttttttttttttttgagacagggtcttgctctgccactcaggctgggctgcagtggcatgatcacagctcactgcagcctcgacctctcaggcccaagcgatcctcctacctcatcctcccaagtagccgggaccacaggcatgcaccaccacgcccagctaattaaaaaaaaaaaatttgtagagatgggggtctccctgtgttgtccaggctgatcatgaactcctgggctcaagtgatcctcccaactcagcctctcaaagtgctggcattacaggcgtgagccactgcacctggccaacagggagccttctcttggggatactgcctgcaggtcctgcatgtatcttttttgaggttttggcttcatttgaattctcctcagaaactttatattttctgttcccaaggaaatctttctttacttctgtttttttgtttgcttattttaaacaggatctagaacagaaaatgaaagtggtagagaatctccaggatgactttgatttcaactataaaaccctcaagagtcaaggaggcaagtgaatattagagatgttaaaatctctagaaagtgagtttgtgttgttgagttgaaagactcatttgtcttaactctgtttagatcttaaggcgggcggggcgcaagggaggtacgggtcctcaaaggagcctggtcattaaggacaggagtattccctcaggtccaggagtattccctcaggtccaggagtattccctcaggtcaaggagtattccctcaggtcaaggagtattccctcaggtccaggagtattccctcaggtccaggagtattccctcaggtccaggagtattccctcaggtccaggagtattccctcaggtccaggagtattccctcaggtcaaggagtattccctcaggtccaggagtattccctcaggtccaggagtattccctcaggtccaggagtattccctcaggtccaggagtattccctcaggtccaggagtattccctcaggtcaaggagtattccctcaggtccaggagtattccctcaggtccaggagtattccctcaggtccaggagtattccctcaggtcaaggagtattccctcaggtccaggagtattccctcaggtccaggagtattccctcaggtccaggagtattccctcaggtccaggagtattccctcaggtccaggagtattccctcaggtccaggagtattccctcaggtccaggagtattccctcaggtccaggagtattccctcaggtcaaggagtattccctcaggtccaggagtattccctcaggtccaggagtattccctcaggtccaggagtattccctcaggtcaaggagtattccctcaggtcaaggagtattccctcaggtcaaggagttttttcttccttcgcagacatgcaagatctgaatggaaacaaccagtcagtgaccaggcagaagatgcagcagctggaacagatgctcactgcgctggaccagatgcggagagtaagggcataggtcggaccacttcccccatgtgtctcgctcacttgcgggatttcagcgtcttgtggcagaacttgcttggtttctaagaagttcctgctctggagttgactaaagaatgtggttagagacagtctgaggaaatgttttctgactttgttttggtttccaaccagagcatcgtgagtgagctggcggggcttttgtcagcgatggagtacgtgcagaaaactctcacggacgaggagctggctgactggaagaggcggcaacagattgcctgcattggaggcccgcccaacatctgcctagatcggctagaaaactggtaaaggatgaaagaagcttttcctttctttctcgaaagctagattgaattctgatcttaactgcaggcccacagaattggtactatatctccaacgtggggacttttccatattcaaatttagcccaagaattaaagtttttactttatttcggccaggcgctgtggctcacacctgtaatcccagcactttgggagaccaagatgggcggatcacttgaggtcaggagtttgagaccagcctggccaacatggtgaaaacacatctctactaaaaacataaaaaaattagccgggcgtggtggtgcgcacctgtagtcccagctactctgggcggctgaggcaggagaatcacttgaacctgggatatggaagttgcagtgagcggagatcttactaccgcacaccaaccagcctgggagacagagtgagactccatctcaaaaaaataaaaataaaataaagtttttactttatttggagaaactttgttttaaaaaatgtatttatattattatattttaagtatattttacttaataattcaattaaggcttttggtttaactgtatttaacagatagacaaaccttttaattttagttattttagtaatctaaaatgacacatgccctttttaagggaaaaaattcaaatacagaaaattaatcaagagaagaaaaaatttttaaatgaaatcatcagcagtactagtagttaaaatttagttgatgctcaatctagacatctgtcattatgtatatacacattatgtatatacacataaagatagaaatttatacagtttatattaggatcatttttttttctttttttggagtcagggtctcactgtgttacccagtctagagtacagttatgcagtcatggctcactggagccttgacctcctgggctcaggcagtcttcccaccttagccttctcagtagctgggactacaggcatgcaccaccacacctggctaatttttaaattttttatagagacagggtcttactttgttgcctgggctggtctcaaattcctgggctcaagggatcatcccacttcggcctctcaaaagctctggaattatagatgtgagctgccgtgcccagcccaggatcttcctttatatgcttttctgtaatttgcacttttaccttcatccagcatatcttactgcaacccttcctgtgcaaggccctatagtgagcatgttgcaccagcttgccttaggagaaacttgagatacagagcctgcactggaaatttagcgcaactctacatgagaatgcctgtctattcatatcctcactaaccctgagtgttgttaatttactgaaagcagttttaaatgcttcctgaccagggaacgaagaagcttaagttctgggaatgggaggatagaagtgccagaaaagagctcaggagttcagaaatccctgcagcggtccccctccctctcctttcactttctgtctttctggtcttttggtctttgttacactagtgataaaccatcaaagaatgatggaatgatgctaacttctctctttttttaatttttttgagacagagtctcactctgtcacccaggttagagtgcagtggcatgatcttggcttactgcaacctcctcctcccaggttcaagcgattcttagtcacaaccttccaagtagctgggattacaggcccatgccaccatgcctggctatttttttgtattttagtagatcgacctgcctcggcctctcaaatttttgggattacaggtgtcagccactgcacctggcctaatatctctattcttggagatagatttaatgagctttttctccctctctattcacttattccttgtgcatgttatcaatattttgaaacataatgtcatgtcctttgatcagttgaaggctgacattgaaaaggcttatggggattgggtgttgtggctcacgcctgtaaatcccaatgctttgggaggcagagtcgggaggatcacttgaacccaggagtttgagaccagcctgggcaacaaagtgagatcccatccctacaaaaatttaaaaaactagacatgtgccattacacttcagcctgggtgacagagtgagactccatctcaaaaaactaaactaaactaaacaggcatggtggcacacacctatagttctagctactcaggaagctgaggtaggaggatcactcatgtccaggagttggaggaggcagtgagctatgatcatgccattgcactgcactaggccacagagtgggaccctgtctcaaaaaaaaaaaaagaaagaaagaaaagaaagggctcatgtagttcaagcccttctcttcatgcaaggggatgctaaggcccatgatggtgaagggcctggcaaagcttgcacagatagtgtgtgacagagctggctcaaacccatctttgggagctgtctaatctctttttctgagtctttatgttcatagacaagttaggatgagtaaagtaagtgctaaattccatatttcgtgttctgcatatctgggctcagatgcttgtcattttccagtgataactccatcaatgcctcctagtggtataaattttaatacttcttgtgtgcccagccccctcttagaaatttgagattttaggaagggactagtaataaaaggtaaaataaattattttctggccaggcatggtggctcacacctgtaatgccagtacttcgggaggtcgaggcagatggatcacctgaggtcaggagttcaagaccagcctggccaacaaggcaaaatcccatctctactaaaaatgcaaaaattatccgggagtggtggtgggtgcctgtaatcccagctacttgggaggctgaggcaggagaatcacttgaacttgggaggcggaggttgcagtgagctgagactgtgccactgcactccagcctgggcaacagagtaagactctatctcaaaaaaaaaaaaaaaaaaaaaaaggccaggcgcagtggcttacacctgtaatctctcaggaggctcaggcaggagaatcacttgaacccgggaaatggaggttgcagtgagccgagattgcaccactgcactccagctcaaaaaataaataaataaataaattattttctttttttatttattttttcagcatccacccaacatggtgaaaaattcctcttttcttaatgtcactgaactgtaaacttaagatgaaaaattgtaaatttcatgctatatatatttcaccacaataaaaaaattccttgttcttattgtagtggtctccatgtcttcagtatttccttccccttctccatctcacctgtatacattcactttggtaattagcatctttcttaatttattggcaggataacgtcattagcagaatctcaacttcagacccgtcaacaaattaagaaactggaggagttgcagcaaaaagtttcctacaaaggggaccccattgtacagcaccggccgatgctggaggagagaatcgtggagctgtttagaaacttaatgaaaaggtaatttagcatccttgtccctttccctcatctaaaaaatacctaaagactcacgtggtagagtgagaggcgggctgacttctggtcatggccgtggcgcgtgagcccatcttctctttcctcagtgcctttgtggtggagcggcagccctgcatgcccatgcatcctgaccggcccctcgtcatcaagaccggcgtccagttcactactaaagtcaggtaggccatgccacttccatttccagtagagattttactgagggacactgttagggtgagggtagagttggtggccagggtcattctttccaggtgtggtgtcacaggcagtacactgttgcggggttgaaatttgttgccatactatctgcttgctctctgattctgatgtcaaaagcaaaagagcagtcatctttttgaaggtacctgggcatattcctatgattgtagacctggagtctcaggccacagcttctccttctgcccaagggacaaaataatgtcatctattttctgttctttgaggctactcttccctgtggattttaagggaaagagtaaggcttagtgatggggaagctgagaggccccagggcaggtgggtggtgggcctgtagggtgaggtgttactttcacactcaagtcagaacaggtgtgctggggttttgaccttctgcagcaaaatttccctcctcagaaacttagtatggtgttcggtttcaggattaatagaacaaaatgccagctgcacagcatgtgttcctgtaatatttttcattatatggctttgattatccttttgtgaatctctcacaactttaagttgttagttcttagatgttttctcagtacctttggcttgaaggagtgatactcatcttttgtttttgtttgagacagggtctcactctcacccaggctggtgtgcagtggcatgatctcagctcactgcaacctccatctcccaggttcaagtgattcttgtgcctcagcctcctgagtaactgggaatagaggtgcgtgccaccacacccggctaatttttttttttttgagacagagtctcgctctttcggccaggccagagtgcgtgttgcaatctcaactcactgcaacctccacctcccaggttcaagcgattctcctgccttagcctccctgagtagctggaccggcacactccaccatgcccggctaatttttgtatttttagtagagacagggtttctccatgttggccaggctggtctcaaaactcctgacctcagtaatccacccaccccggcctccaaaagtgctgggattacagatgtgagccaccacgctcggcctttttttttttttttttttttttgagatggagtctttctctatcacccaggctagagtgctgaggtgtgatctcggatcactgcagcctctgcctcctgggttcaagtgattctcctgcctcagcctcccaagtagctgggattacaggtacctgccaccatgcccggctgatttttgtatttttagtagagacggggtttcaccatcttggccaggctggtctcgaactcctgaccttgtgatccacctgccttggcctcccaaagtgctgggattacaggtgtgagtcaccgcacccagccctattttaatttttttaaagagagagataggggccaggcacggtggctctcgcctgtaatcccagcactttgggaggccaaggtgggtggatcacctgaggtcgggagttcgagaccatcctgaccaacatggagaaactctgtctctactaaaaatacaaaattagctgagcgtggtggcgcgcgcctgtaatcccagctacttgagaggctgaggcaggagaatcacttgaacccaggaggcggaggttgcggtgaacggagattgcgccattgcactccagcctgggtaacgagagaaactgtctcaaaaaaaaaaaaagagaaagagagataggatctcgctctgtcatctaggctagagtgcagtggcatgatcatagatcactgtagccttgaactcctgggcacaagtgatcctcttgcctcagcctcccgagtaactgcgactacaggtacatgctaccacaccccgctaatttttaaattttttatagatgtgggctctcactttgttgcccagactgttatggaactcctgggctcaagggatcctcccagcttggcctcccacagtgctgagattatagatgtgagcctgtaattatagacagcttggcctatttacctgttggaaatgaagaattatgaattttacatttcttcaagaaaaggttatgggagagttactgactttttttccttggattttttctttttaaataggttgctggtcaaattccctgagttgaattatcagcttaaaattaaagtgtgcattgacaagtaagtactcctatcttagctctgtttttcaaatgaggaatagaaaaatgagaactttgacagacatcatttgaactagagactctgtctttattcagagatcttcattttgtggacaaaagttttcaaaagccttggggtgcattgtcatttacgtgtctgaacaaagccacaaagctgggggtacagatttgatttgtggttgctattgtgacaaccagtccctcttttccttgtttagttttttacttgtacatgtcattcatgcatattatatataagactgagatcatgtgttaattaacgactgggatacgttctgcaaaatgtatcattaggcaattttgttgtgcaaatgttgtagagtatatagtccttacacaaacctgggtggcagaacctactgcacacctacgctatgtggcagagcctactggtcgtaggctgtaaacctgtacagtatgttactgtgctgaataccgtaggcaattgtaacacatctcaatgaagtaggaatttttcagctccatgataatcttatgggaccaccatcatatatgcattttgttgttgaccgaaacgtcgttatatattctttccatacatagcatgtggaaagaatagatctcttttttttaattgttccacactttaccatataatggaatacgcaaaatttcacaatacctttcaggatgtaaaatacatataccctttgacgacattagaaaagagaaaatgtgggccgggcgcggtggctcatgcctgtaatcccagcactttgggaggccgaggcgggcggatcacgaggtcaggagatcgagaccatcctgggtaacacggtgaaaccccgtctctactaaaaatacaaaaaaactagctgggcgtggtggcgggcacctgtagtcccagctactcaggaggctgaggcaggagaatggcatgaacctgggaggtggagtttgcagtgagccaagatcacaccactgcactccagcctgggcgacagagactccatctcaaaaaaaaaaaaaaagaaaagaaaagagaaaatgtggctgggcgcggtggctcacgcctgtaatctcagcactttgggaggctgaggtgggcagatcacctgaggtcgagagttcgaaaccagcccgaccaacatggagaaaccttgtctctactaaaaatacaaaattagccaggtgtgttggcgcatgcccgtaatcccagctacacgggaggctgaggcaggagaatcacttgaactcaggaggtggaggttgtggtgagccgagatcacaccattgcactccagcctgggcaacaagagcgaaactatctcaaaaaaaaaaaaagaaaaaagaaaagataaaatgcattcttatttttagttgatgtaattatgtggaaatttcatgaggatgcactggaaaataatgaaataagggagttgacgaaggtggtaggtttaataagtacatatgcaatatgaaacataggttccccttcctatggggaggcaaccaactgtgcctgctacgcagaggtgttatgttgcgctgatcaactgtaactgaatagtttaaagaaatgcccaggagcacagaggttttttcatgacagtaaataacaggtggtcaaagtaggctttttgaagaaacacagagcctattttattaacaacagtctgtgttcttacagagactctggggacgttgcagctctcagagggtaagttcagcctagaggcttccttttgttccgtttaacctaacttcatcctccggctacttggtcacctacatagttgattgttcccctgtgattcagatcccggaaatttaacattctgggcacaaacacaaaagtgatgaacatggaagaatccaacaacggcagcctctctgcagaattcaaacacttggtatgtgggaggagctccccttcacaaagggcctctggctgccggagagggctagggagagcctcacaggacacctgcctttttcttttcttacagaccctgagggagcagagatgtgggaatgggggccgagccaattgtgatgtaagttttgttggggatgaaagacaactggggtgttttccttgagggagagaggggtaaagatccttcttaatccccagaattagaaacatcaacctgttctttcagctgtagttattccaaaaagtcacttcaggccaaagtgacatgaacagaagttccatgtgccatggagctctctggcttggaacatttccgtgaatatctgggagttggctcctccttaaggagaagtggaaagtcccttgctgagttgttctccacacccatgtggtataaagcagctttccaccttgcctggggctttccaaattccccatccagctcctgcggctgaccctgcttggctccatttttagtgccctgtttttctctcccactgaggtgggatagagggtgtaaaagcaacagatttgagttaaactttaaaataaatgaccaccttgcattagcttgcttaggaaaagagtacataaaataaaatgaacaaacaaaaacccatcttgttctttatcccccttattttctgcttttcattgattcagattattggattcttattgtcaagaataaactttaaacaaacaaacaaaaaaaggtaaatgtgacggaaggctagttttcagtcatttttaaaaattgtgatgccccgttctttttcttacatttgtcccctgaacaattcttcctctttaaaatgtagcagtcctagctgggcgtgctggctcacaccccgtactttgggatgccaaggcaggctggtcacttgaggtcaggagttcaagaccagcctggccaacatggtgaaagcccgtctctactaaagatacaaaaattagctgggtgtggtggtgcacgcctgtagtcccagttactggggaggctgaggcatgagaatcgcttgaacctgagaggtggagcttgcagtgagccaagattttgccactgcactctagcctgggcaacagagtgaaactctgtctcaaaaaaataaataaaataaaatgtagcagtcctttttaaaaatgtggaattttacttgacagtagagtgaagtagcctgtatgcaatgatatgggaaaatgtacatgacatattaagaaaaagcaaaatgtaaaataatttgaatagtattattagtatatgtgttttaaaaatacactatactcttatgtgtattcatatgtatattaagaaattctggaggaatataccagcagtgctatgtgtattagtgctgctgttggtatccatggctattctagactgtctctgtgatatttgcattttaaactgaatatattacttttataatcagaaaaatagtattaaaaatgaattataatttaatttcttttttcttttttttttttgagtcggagtctcgttctatcggattgcagtggtgcgatctcagctcactgcaacctctgcctcctaggttcaagcgattctcctgtctcagcctcccaagtagctgggacgataggtgcatgccaccacgcctggctaatttttgcatttttagtagagacagggtttcaccatattggtcaggctggtcttgaactcctgacctcgtgatccacccatctcggcctccgaaagtgctgggattacaggcatgagccgctgtgcccagactagaattcaatttttgagaattcattgacaactcttacttaaaataaggttgctgtactgatgtgagacattgttgtagtcagtttggaaaacaatttggcagtataaaaatgaacatacctgtaaaccaacggtgccattcccaggatttaatagcagagaaatctttgcatatatgtcccaggagacatatataaagtggacatcagcctgattataagctctaaatgcaacccaaataaatacccatcaacattagaatgaatacattatttgtggtatagacacaatggaatactccgcagctgtgaaaaggaatacactgcagatacacataaccatgtggattcatttcacatcaagtgaaaagtgaatcccaaaagaattcattggagtccataagtgtaaggttcacaaatgtcccaaactaaacaatacctgcattgcttagataaacaaatatggtaaaactgtaaaaaaacaaaacaaaacaagacaaaaagggctaggaaatgataaacccaaaagacaaaatagcagttatttctgagggaggagggaaggggatggggttggggaagggcacccagagaattttaggagtgatggacttttccttaaattgaatggtgggttcatattgttttgttattctttgtgccttacgtattttacaaataaccaattggatctatgtaatattataatacaaactgagtaaaggattaggttgaggatcacagcattggaagttcttggtgttgaagagagtaagtgccgagcaagttgtgtccctggcagtttgtttgtgaccacctggtggcttacccttcttggtgtggtgaggcttggcatgtcactttccttggctgtggctgttagtactgaatgccattctctctgaggaaaagtgtccttctcttttttattgattgactgattgattgagacagagtctcactctgtcacccaggctggagtgcagtggcgtgatctcggctcactgcatcctctgcctcctgggttcaagcgattctcctgcctcagcctcctgagtagctgggactacaggcgcccactaccacacccagctaatttttgtattcttagtagaaacggggtttcaccaaattattggccaggctggtctcgaactcctgaccatgtgatccacctgcctcggcctcccaaaatgctgggattgtaggtgtgagccatcacgctcagcctttttttttatttaatttaatttttttttaagacagggtctcactctgtcaccccagctagagtgcagtggcacaatcatagctcgctgcagcctccatctcctaggctcaagccatcctcccacctcagcctctcgagtagctggggctataggtgtgcaccaccacacccagctaatttttgtattttttgcagagatggagttttgctgtgctgcttagactggtctcgaactcctgggctcaggcaatcctcctgccttggcctcccaaagtgctgggattacaggcatgagccaccacacctggcctaagagtgtccttctcgttactgtaggcttccctgattgtgactgaggagctgcacctgatcacctttgagaccgaggtgtatcaccaaggcctcaagattgacctagaggtaagttctgcagcagaatcggtgagaggctacgtacaggggtgactcaggacaaaaacttccactgggatttttacaagagaaggtggaatgattactgtttgcttaacactgtgtttatttttgcttacttttctccaaaaaaatccttggcatcccatctggcaataaagtcttgcttgaatgcttagaagatgtgtgtatattcagctttcagcaaacttgatatgaaaatctctatttagaaattgattggccgggcgcggtggctcacgcctgtaatcccagcactttgggaggctgaggcgggtggatcacgaggtcaggagttcgagaccagcctggccaacatgacgaaaccccgtctctactaaaatacaaaaattagctgggtatggtggcggacgcctataatcccagctactcgggaggctgaggcaggagaatcacttgaacctgggaggcagaggttgcagtgagctgagattgtgccattgcactccagcctgggtgacagagtgagactccgtctcaaaaaaaaaaaaaagaaattagaactgactttataaagtttgggcataagagtcttagcagccagtgtgtttagtatacagaaaattgtggcaatgacattctcctttcccaactttcttgatttttaaattaagatatacctagaaaagcaggaatcctggtctttgattcctgagacctccctgtttcatgtgaagatacagcttcaagtcttggagaatgcctccaaggtcttaaaaatggggaatctgtggattgtgagtcaagctttgagcaagtcaggttttacaagggaccggtatattccgactgcagcctgagttgtgtggccacgctgggcattctttccactatgagtgctcactgagctgactcactcacactcctcgcctagagttggcagcaggtgtggtttatggcatgtcctttcattctgagccccgtgagatgcgggtgaagagatttccaaggctgtgagagcccctctgcctccccagctcagtccccactccctccgcagacccactccttgccagttgtggtgatctccaacatctgtcagatgccaaatgcctgggcgtccatcctgtggtacaacatgctgaccaacaatcccaaggttagtgccccctccttttagttggtgccccgggatctcttgcgacttaggggtacctagtatagacaatgagcaccatccctcatctaaacaagcaaatgtgttctttccaatagaatgtaaacttttttaccaagcccccaattggaacctgggatcaagtggccgaggtcctgagctggcagttctcctccaccaccaagcgaggactgagcatcgagcagctgactacactggcagagaaactcttgggtccgcatttcaccccttctccctcccgcccacccgcccagaaaagggatccggcccatagggctgttcatttgggccatgtctactgagcattaggccatgtttctttcctgagcaaggcgctgtgctggtgccaggaaacaggggagttggggagttggggtgcagagacagtttgcagttttcagtcgaggtgatcatttttgaggtgggaggtagatttcttttctcctggttgctgtctcattcacccactctatctaactttagaagatcttttaagtgtgtgttggaaggtggcactaaaggcttgacattccctgtccatttttttaataaactataggctagttggttttttttgtcttattttatttatttatttatttttttgagacgagtcttgctctgttgcccaggctggagtgcagtagtgtgatctcggctcactgcaacctccgccttctgggttcaagcgattcttctgcctcggcctcccgagtagctgagactacaggtgctcaccaccacgcccagctaatttttgtatttttagtagagacggggttttaccatgttggccaggatagtctccgtctcttcacctcgtgatccgcccacctcggcctcctaaagtgctgggattacaggcttgagccactgtgcccagcgtaggctagtttttaaaaaagaattagtggaatattttatgtgccacctgggctagaagtagctttgttctaataaagctgttgccaccaaatacacctgtctgacacccgatgtcagcttgttagtgagtgctgctgttggttcccagcctaccacccgaggttgggaagagcagggggacttgttatatcaccctccatccctgctgggctacccagcaacacaagtgagtcaaatgatgggatagtgtttgtcctcatgtgcacacacacaacagtgcctaccttcaaagatgtgaaagctgattattttgtggcccattgtgggatgaatgtgtgtgtgttctgttttaagaaataacctcttgaccccaagctgaaaatgtactacttgactctttttctttccttcaggacctggtgtgaattattcagggtgtcagatcacatgggctaaattttgcaaagtaagcaatcttgttaaattctcgtgggaatgggaatgctcacctgcacggctgtcgttgagggctctggcttgaaggccctgaactcttggtccagcggccagtaggacctgcctgaaggtagacgggcctgaggatttgggtgatgcactgcacccctaggaagggaagggctgggatggcagtagacttggctttcccattactcttttctccaggaaaacatggctggcaagggcttctccttctgggtctggctggacaatatcattgaccttgtgaaaaagtacatcctggccctttggaacgaagggtaggttggacagagtgtgcacagatgtaaccaagtcccctgctctcagcaagccagtggcaggggatggatgccctgttagcaataacaacattgttcctcctccttggctccaggtacatcatgggctttatcagtaaggagcgggagcgggccatcttgagcactaagcctccaggcaccttcctgctaagattcagtgaaagcagcaaagaaggaggcgtcactttcacttgggtggagaaggacatcagcggtaagggaggctcccacccaccccacctgctggtggctgctgaggcctcatcactgcttctagttgcaagcacctactgccccctggtgggtggagatggccttgactccctgtttcactcagactcgcaaaacacatttgcgtgacttctaaatccttccagctgaaggattggtttgctttgttttgcttgctccagtgactatttgttgagaattttgcaatttaaattgtattcttcatctctttttctacttaaccctgttaatatatcttacgcaagtagttatattcaagtttattttctatgacccaactagtagcctcttcttaattagaagccagcctgaatatttccacagtgccaggccactgaacagggtgttcagggtctcaacactagggtggcttaagtcttttccccttcgaggaaagaaaaaatgggcagttttctctgagatgacctagctgtaggttccatgatctttccttcccatgtcctgtgacaggtaagacccagatccagtccgtggaaccatacacaaagcagcagctgaacaacatgtcatttgctgaaatcatcatgggctataagatcatggatgctaccaatatcctggtgtctccactggtctatctctatcctgacattcccaaggaggaggcattcggaaagtattgtcggccagagagccaggagcatcctgaagctgacccaggtagttgttgattttccatgttcctggcatttaatttttgggaaaagttggaaattttgggatccttggaggatagataggcaaatgcctgaataacctgggggataattatttctccttatgggaaagaattgtagtgagtgcttttgttggggtgaccgatgggatttgagaggagaatcagaatcacttagagtagtgtagttcctgctccacagagagtgcatgagtctaaagaggggatacagcctgggcaatatggtgaaacctcgtctctacaaaaaatccaaaaaaattacccggtgtggtggcacgcatttgtagtcgtagctacttgggaggctgaggtgggaggatcacctgagccaaggagttcaaggctgtagtgagcggtgatcatgccaccgcactccagcctggctgatagagtgagatactgtgtcaaaaaataaaaataaagaggggatcaatacacatacgtcccccaaaacatgcctgaaacacgagaagggaaagtgagggcagttaacaggatgccctgctggcacagtgcttcttagtagatgctagaaggtttgaggcccagatttcagcccagcatatggctttttgcctgtaactgaaccatgtcagtgtgccagatggtctgaagaaagggtttctggaggaaattattattagctgcatgggagtatggtttacactagagtagaagagctgggagcatcacgtttgaaggggaagacagtgactgggtggaggggcaagggattagtatttagagtgtgcaactattgaaaataaggtatattttaatgtgtaagaggacatgtacttatatgttatatataaattattttagctgggtgaagtggctcatgcctatagtcctagcactttgggaggcccaggcgggaggatcacttgagcctgggagtttgagaacagcctagacaacatagtgagaccctatctatacaaaaataattttttttaaattagccacgtgtggtggtttgtgcctgtagtcctagctactcgggaggctgaggtgggaggattgcttaagcccaggaggttgaggctgcagtgagccatgatcgcaccactgcactccagcctgggtgacagagcaagaccttgactcaccaaaaaaaaaaaaaaaaaaaagagagagaaattaaaaatactgtaatctcagctgggcatgggggttcacacctgcagtcctagcactttgggaggctgaagcaggaggatcacttgaggccaggaactcaagaccagcctggcaacatagcaagaccccactacacacacacacacacacacacacaaagaagagaaagaaaaaaacgaaacaaaactgtaatctctgcagctgtcctcagtgtggagggggtagccctgtctgttccccttcagcacttgctgttttgactctctgggttctttgtgcaggtcttgatggggagtctctggtttgccattctttgtttgatttaactttctgtaatcataaagccaatgatgggctttttttttttttttttttttagactaagtcttgctctatcacccaagctggagtgcagtggcaccatctcggctcactgcaacctccacctcccggttcaagcaattctcctgcctcagcctcccgagtagctgggattatgggcttgtgccaccatgcccagctgatttttgtattttttgtagagaaagggtttcgccatgttggccaggctggcctcgaactcctgacctcaggtgatctgcccacttcagcctcccaaagtgctgggattacaggcgtgagccactgtgcctggcctaatgatgggctctttaatgtgatcctttagggttggcgccttgccctagttgctgttgaaaaaactatttttgtccaaatagcacacacacagaaacctaccaacttccctcccactttttcctaggaattccttctgagggatttcttgagatggggcagaatggggcttggaagagggagttggagctaattgaccgttgcctttctcctttgttggggtcctgagtcttgttcctgctgtaagagttactcacttcctgtctgccacctatctccctttgcatgtgtgcttcagttgggagatctgtttatcagcccctgccacacggctctttgttccttctgcagaggacgttggggtcccacggctggtccttttgactcattttgctttcaaggtcccacctcccagtctgaggctgcatcctccattaccatcgcccttcctgtgggctgggaggccaggtcctttcctgcccagcgatgtcagcgtttcctcaggggccaggcactcatcaggagaaaggaactaattacttgagtaatttgccttgccttgctgagaggagtgtgccctgagggactccatgtgagtgtggtgacgggtgtgggggtgtccctgtgttattttaaaatgggtgccttcaggacgatgagcatgtgaccatttcctctctatttccatcacaagagtattatggtatgagggtctcaggttagattatcctcccaagactcttctctcttccttctctactggaagcccacatagcatttccttatggcttgagggagaggttcggagccacttacaaattagataaagtacatttacaatcttgtacaaagccacacaatgaagtcatttttctcagctttttttttttttttttttttttttttgagcctgagtctcgctctatcgtccagactggagtgcagtggcgcgatcttgcttcactgaaacctctgcctcccaggttcaagagattctcatacctcagcctcctgagtagctgggattacagacatgcaccactatgcctggctaatttttggatttttagtagagaccgggtttcaccctgttggccaggctggtctcgaacccctgacctcaagtgatcttcccgcctgggcctcccaaagtgctgggattataggtgtgagccacagtgcccagccttgtttttgtttttgttttgttttgacagtctgtcactctgtcacccaggctggagtgcagtggtgcgatctcacctcacttcagcctctgcctcccaggttcaagtgattctcctgtctcagcctcctgagtagctgggattacaggcgtgccaccacgcccagctatttttgtaatttcattaaagacagggtttccccatgttggtgaggctggtcttgaactcctggcctcaagtgatccacctgcttcagcctcccaaagtgcagggattacaggcatgagccactgtgcctggcctcagctatcttgaatgctggagaattaaatccttttctgtctagggtgtcagctccctaagggctgggccaaaacagttggatttataagacactagagtcttgcctcagtagctcctttgaattctgcactgaattgatcagtttcttggcccaaagtaaactcagatggcagcccaagagccactctgcagtgccttctttcacatggtcatcatgctctctgatccctcaggttctgtctaagcctcatgttttatgaccgtgctgttctcagcccacctcaccctgccccatgccttctcaatggtttgttcacctgaattccccagatttcatgccagtatccccaaggttccttgacctcttggtgtaagcattcagcatctaaaattcattttattcccgtcaacgcatttctaactgtagaacaagaattataaatgacaaagctcatagaaaattggcaccttgtcttccccctccctcttattttatacataaaagagaatatgggctgggcattgtggccaaggctgggcatgatagctcatacttgtaatccagcactttgggagggtgaggcagatggatcacctgaggtcaggagttcaagaccagcctggccaacatggtgaaacctcatctctactaaaattacaaaaaaaaaattagctaggcatggtggcagatgcctgtaatccagctactcaggaggctgatgaaggagaatcacttgaaccctggaggcagaggttgtagagagccaagatggcgctactgcactccaacctgggcgaaagagagcaagactccgtctcaaaaaaaaaaaagacaaaaattagccaggcatggtggtgccacctgtagtcccagctgcttgggagcctaaggcaggagaatcgttttgacctgggagtaggaggttgcggtaaccgagattgtgccactgcacttgagcctgggcaacagagtgagactctgtctcaaaacaataagaacaacagcaacaaaagagagagaccatgccttgctccaggtctcttagctattgaagatgtacctggacccaggtctccggtcttctagttgaagcaattgtactgccttacaaagtcacattctctttggtgctttttgattgacgtatttatccaactagaaagttactcatgccctcatccaaaaatgtggtagaggccagattagtgctggtaggaataagagatataacctttggctttggaaccacaagcattagcagtctccatgttctttaaagacttggtgatattggtatttaggctggacaccatgcaaagactacacaggctcggttcctgcatgcagagaagttatctaagagatatgaccaggccggaatagaatgctcagaccacgtggaggctgttaaacttttacataatctagggaaagaagggacacaaggtggcattagtctagggtcaggtgggaaaaggttatgctgaaaagtctctgcagctcaggacagctttgtgcaaagaactgaagttcacagctgctagtgcctgggagatcaaatagtataaatgagggcagacaaccctgaggggcagatggagctttccagacaatcttggcatgaggatgagtgagtttcaaatcagtcctgccgaggcagatggcttcctccagctctgcttactgaatgcgaagtcacagtcagtaagaaaactggttttcttcttcccaggcgctgccccatacctgaagaccaagtttatctgtgtgacaccgtaagtggcttcctttccccgttttgccttcatttctaatatcctcagttatccctgggaatgggacactgggtgagagttaatctgccaaaggttggaagcccctgggctatgtttagtactcaaagtgaccttgtgtgtttaaaaagcttgagcttttatttttctgttggagaccagagtttgatggcttgtgtgtgtgtgttttgttcttttttttttttccattgtgtcttgtcaaccccccgtttcccctcctgctgccccccatttcctacagaacgacctgcagcaataccattgacctgccgatgtccccccgcactttagattcattgatgcagtttggaaataatggtgaaggtgctgaaccctcagcaggagggcagtttggtgagtatttggttgacagactttgtccctataagggaagttggtcccctttgtgtgatgctctcacatgtacacaccgagagctggtcactcggaatggtaggagattctagagctttgctttccaaaagagatggtatgaatgccacatgtgtgagtataaatcttctagcagccacactggaaatagacgaacttaatttttacaatatattttatttaacccactaaatccaacatactctcaatttaacatttcagaaaaagttgaggctgggtgagtggctcatgcctgtaatcccagcactttgggaggccgaggtgggtggatcacttgaggtcaggagttcgagaccagtctgaccaaaatctctaaaatataaaaattagctgggcatggtggcgcatacctgtaatcccagctactcaagaagctgaggtgggaggatcgcttgagcctgggaggtggaggttgcagtgagcagagatcgtgccactgcactccagcctgggcgacagagtgagactccatctcaaataaacaaaactaaactaaaaagaaaaagttgagacctttttttattcttttttttcatactaagcctttaaaatccagtgggcttttgacagccacagcacagctcagtttggacaaaccaaatctcaaatgcttggtggccacgtgtgtctcggggctcctgaattaaacagtagatcaagggcagaagatctcaggacagccttagagcttctgtaaacatggagctctgggaatcagttaaggtgggaatgagaaaggacccttcccgaggcagggtcctccagggaggagggtaaatctggcttttctgaccatccctgggccttaaggggcaggagattggatagcagtggtagcctgggccctgtcctctgaagggctgggggcgtggcctgccagttgcagagggtggacaactgaactagttttccctgtctgtccctccagagtccctcacctttgacatggagttgacctcggagtgcgctacctcccccatgtgaggagctgagaacggaagctgcagaaagatacgactgaggcgcctacctgcattctgccacccctcacacagccaaaccccagatcatctgaaactactaactttgtggttccagattttttttaatctcctacttctgctatctttgagcaatctgggcacttttaaaaatagagaaatgagtgaatgtgggtgatctgcttttatctaaatgcaaataaggatgtgttctctgagacccatgatcaggggatgtggcggggggtggctagagggagaaaaaggaaatgtcttgtgttgttttgttcccctgccctcctttctcagcagctttttgttattgttgttgttgttcttagacaagtgcctcctggtgcctgcggcatccttctgcctgtttctgtaagcaaatgccacaggccacctatagctacatactcctggcattgcactttttaaccttgctgacatccaaatagaagataggactatctaagccctaggtttctttttaaattaagaaataataacaattaaagggcaaaaaacactgtatcagcatagcctttctgtatttaagaaacttaagcagccgggcatggtggctcacgcctgtaatcccagcactttgggaggccgaggcggatcataaggtcaggagatcaagaccatcctggctaacacggtgaaaccccgtctctactaaaagtacaaaaaattagctgggtgtggtggtgggcgcctgtagtcccagctactcgggaggctgaggcaggagaatcgcttgaacctgagaggcggaggttgcagtgagccaaaattgcaccactgcacactgcactccatcctgggcgacagtctgagactctgtctcaaaaaaaaaaaaaaaaaaaagaaacttcagttaacagcctccttggtgctttaagcattcagcttccttcaggctggtaatttatataatccctgaaacgggcttcaggtcaaacccttaagacatctgaagctgcaacctggcctttggtgttgaaataggaaggtttaaggagaatctaagcattttagacttttttttataaatagacttattttcctttgtaatgtattggccttttagtgagtaaggctgggcagagggtgcttacaaccttgactccctttctccctggacttgatctgctgtttcagaggctaggttgtttctgtgggtgccttatcagggctgggatacttctgattctggcttccttcctgccccaccctcccgaccccagtccccctgatcctgctagaggcatgtctccttgcgtgtctaaaggtccctcatcctgtttgttttaggaatcctggtctcaggacctcatggaagaagagggggagagagttacaggttggacatgatgcacactatggggccccagcgacgtgtctggttgagctcagggaatatggttcttagccagtttcttggtgatatccagtggcacttgtaatggcgtcttcattcagttcatgcagggcaaaggcttactgataaacttgagtctgccctcgtatgagggtgtatacctggcctccctctgaggctggtgactcctccctgctggggccccacaggtgaggcagaacagctagagggcctccccgcctgcccgccttggctggctagctcgcctctcctgtgcgtatgggaacacctagcacgtgctggatgggctgcctctgactcagaggcatggccggatttggcaactcaaaaccaccttgcctcagctgatcagagtttctgtggaattctgtttgttaaatcaaattagctggtctctgaattaagggggagacgaccttctctaagatgaacagggttcgccccagtcctcctgcctggagacagttgatgtgtcatgcagagctcttacttctccagcaacactcttcagtacataataagcttaactgataaacagaatatttagaaaggtgagacttgggcttaccattgggtttaaatcatagggacctagggcgagggttcagggcttctctggagcagatattgtcaagttcatggccttaggtagcatgtatctggtcttaactctgattgtagcaaaagttctgagaggagctgagccctgttgtggcccattaaagaacagggtcctcaggccctgcccgcttcctgtccactgccccctccccatccccagcccagccgagggaatcccgtgggttgcttacctacctataaggtggtttataagctgctgtcctggccactgcattcaaattccaatgtgtacttcatagtgtaaaaatttatattattgtgaggttttttgtcttttttttttttttttttttttggtatattgctgtatctactttaacttccagaaataaacgttatataggaaccgt

SEQ ID NO: 42 - protein, 770 aa, synthetic construct
  REGION 1..770: note = STAT3 Amino Acid Sequence
MAQWNQLQQLDTRYLEQLHQLYSDSFPMELRQFLAPWIESQDWAYAASKESHATLVFHNLLGEIDQQYSRFLQESNVLYQHNLRRIKQFLQSRYLEKPMEIARIVARCLWEESRLLQTAATAAQQGGQANHPTAAVVTEKQQMLEQHLQDVRKRVQDLEQKMKVVENLQDDFDFNYKTLKSQGDMQDLNGNNQSVTRQKMQQLEQMLTALDQMRRSIVSELAGLLSAMEYVQKTLTDEELADWKRRQQIACIGGPPNICLDRLENWITSLAESQLQTRQQIKKLEELQQKVSYKGDPIVQHRPMLEERIVELFRNLMKSAFVVERQPCMPMHPDRPLVIKTGVQFTTKVRLLVKFPELNYQLKIKVCIDKDSGDVAALRGSRKFNILGTNTKVMNMEESNNGSLSAEFKHLTLREQRCGNGGRANCDASLIVTEELHLITFETEVYHQGLKIDLETHSLPVVVISNICQMPNAWASILWYNMLTNNPKNVNFFTKPPIGTWDQVAEVLSWQFSSTTKRGLSIEQLTTLAEKLLGPGVNYSGCQITWAKFCKENMAGKGFSFWVWLDNIIDLVKKYILALWNEGYIMGFISKERERAILSTKPPGTFLLRFSESSKEGGVTFTWVEKDISGKTQIQSVEPYTKQQLNNMSFAEIIMGYKIMDATNILVSPLVYLYPDIPKEEAFGKYCRPESQEHPEADPGSAAPYLKTKFICVTPTTCSNTIDLPMSPRTLDSLMQFGNNGEGAEPSAGGQFESLTFDMELTSECATSPM

SEQ ID NO: 43 - DNA, 4953 bp, synthetic construct
  misc_feature 1..4953: note = Synthetic
  source 1..4953: mol_type = other DNA
ggtttccggagctgcggcggcgcagactgggagggggagccgggggttccgacgtcgcagccgagggaacaagccccaaccggatcctggacaggcaccccggcttggcgctgtctctccccctcggctcggagaggcccttcggcctgagggagcctcgccgcccgtccccggcacacgcgcagccccggcctctcggcctctgccggagaaacaggatggcccaatggaatcagctacagcagcttgacacacggtacctggagcagctccatcagctctacagtgacagcttcccaatggagctgcggcagtttctggccccttggattgagagtcaagattgggcatatgcggccagcaaagaatcacatgccactttggtgtttcataatctcctgggagagattgaccagcagtatagccgcttcctgcaagagtcgaatgttctctatcagcacaatctacgaagaatcaagcagtttcttcagagcaggtatcttgagaagccaatggagattgcccggattgtggcccggtgcctgtgggaagaatcacgccttctacagactgcagccactgcggcccagcaagggggccaggccaaccaccccacagcagccgtggtgacggagaagcagcagatgctggagcagcaccttcaggatgtccggaagagagtgcaggatctagaacagaaaatgaaagtggtagagaatctccaggatgactttgatttcaactataaaaccctcaagagtcaaggagacatgcaagatctgaatggaaacaaccagtcagtgaccaggcagaagatgcagcagctggaacagatgctcactgcgctggaccagatgcggagaagcatcgtgagtgagctggcggggcttttgtcagcgatggagtacgtgcagaaaactctcacggacgaggagctggctgactggaagaggcggcaacagattgcctgcattggaggcccgcccaacatctgcctagatcggctagaaaactggataacgtcattagcagaatctcaacttcagacccgtcaacaaattaagaaactggaggagttgcagcaaaaagtttcctacaaaggggaccccattgtacagcaccggccgatgctggaggagagaatcgtggagctgtttagaaacttaatgaaaagtgcctttgtggtggagcggcagccctgcatgcccatgcatcctgaccggcccctcgtcatcaagaccggcgtccagttcactactaaagtcaggttgctggtcaaattccctgagttgaattatcagcttaaaattaaagtgtgcattgacaaagactctggggacgttgcagctctcagaggatcccggaaatttaacattctgggcacaaacacaaaagtgatgaacatggaagaatccaacaacggcagcctctctgcagaattcaaacacttgaccctgagggagcagagatgtgggaatgggggccgagccaattgtgatgcttccctgattgtgactgaggagctgcacctgatcacctttgagaccgaggtgtatcaccaaggcctcaagattgacctagagacccactccttgccagttgtggtgatctccaacatctgtcagatgccaaatgcctgggcgtccatcctgtggtacaacatgctgaccaacaatcccaagaatgtaaacttttttaccaagcccccaattggaacctgggatcaagtggccgaggtcctgagctggcagttctcctccaccaccaagcgaggactgagcatcgagcagctgactacactggcagagaaactcttgggacctggtgtgaattattcagggtgtcagatcacatgggctaaattttgcaaagaaaacatggctggcaagggcttctccttctgggtctggctggacaatatcattgaccttgtgaaaaagtacatcctggccctttggaacgaagggtacatcatgggctttatcagtaaggagcgggagcgggccatcttgagcactaagcctccaggcaccttcctgctaagattcagtgaaagcagcaaagaaggaggcgtcactttcacttgggtggagaaggacatcagcggtaagacccagatccagtccgtggaaccatacacaaagcagcagctgaacaacatgtcatttgctgaaatcatcatgggctataagatcatggatgctaccaatatcctggtgtctccactggtctatctctatcctgacattcccaaggaggaggcattcggaaagtattgtcggccagagagccaggagcatcctgaagctgacccaggcgctgccccatacctgaagaccaagtttatctgtgtgacaccaacgacctgcagcaataccattgacctgccgatgtccccccgcactttagattcattgatgcagtttggaaataatggtgaaggtgctgaaccctcagcaggagggcagtttgagtccctcacctttgacatggagttgacctcggagtgcgctacctcccccatgtgaggagctgagaacggaagctgcagaaagatacgactgaggcgcctacctgcattctgccacccctcacacagccaaaccccagatcatctgaaactactaactttgtggttccagattttttttaatctcctacttctgctatctttgagcaatctgggcacttttaaaaatagagaaatgagtgaatgtgggtgatctgcttttatctaaatgcaaataaggatgtgttctctgagacccatgatcaggggatgtggcggggggtggctagagggagaaaaaggaaatgtcttgtgttgttttgttcccctgccctcctttctcagcagctttttgttattgttgttgttgttcttagacaagtgcctcctggtgcctgcggcatccttctgcctgtttctgtaagcaaatgccacaggccacctatagctacatactcctggcattgcactttttaaccttgctgacatccaaatagaagataggactatctaagccctaggtttctttttaaattaagaaataataacaattaaagggcaaaaaacactgtatcagcatagcctttctgtatttaagaaacttaagcagccgggcatggtggctcacgcctgtaatcccagcactttgggaggccgaggcggatcataaggtcaggagatcaagaccatcctggctaacacggtgaaaccccgtctctactaaaagtacaaaaaattagctgggtgtggtggtgggcgcctgtagtcccagctactcgggaggctgaggcaggagaatcgcttgaacctgagaggcggaggttgcagtgagccaaaattgcaccactgcacactgcactccatcctgggcgacagtctgagactctgtctcaaaaaaaaaaaaaaaaaaaagaaacttcagttaacagcctccttggtgctttaagcattcagcttccttcaggctggtaatttatataatccctgaaacgggcttcaggtcaaacccttaagacatctgaagctgcaacctggcctttggtgttgaaataggaaggtttaaggagaatctaagcattttagacttttttttataaatagacttattttcctttgtaatgtattggccttttagtgagtaaggctgggcagagggtgcttacaaccttgactccctttctccctggacttgatctgctgtttcagaggctaggttgtttctgtgggtgccttatcagggctgggatacttctgattctggcttccttcctgccccaccctcccgaccccagtccccctgatcctgctagaggcatgtctccttgcgtgtctaaaggtccctcatcctgtttgttttaggaatcctggtctcaggacctcatggaagaagagggggagagagttacaggttggacatgatgcacactatggggccccagcgacgtgtctggttgagctcagggaatatggttcttagccagtttcttggtgatatccagtggcacttgtaatggcgtcttcattcagttcatgcagggcaaaggcttactgataaacttgagtctgccctcgtatgagggtgtatacctggcctccctctgaggctggtgactcctccctgctggggccccacaggtgaggcagaacagctagagggcctccccgcctgcccgccttggctggctagctcgcctctcctgtgcgtatgggaacacctagcacgtgctggatgggctgcctctgactcagaggcatggccggatttggcaactcaaaaccaccttgcctcagctgatcagagtttctgtggaattctgtttgttaaatcaaattagctggtctctgaattaagggggagacgaccttctctaagatgaacagggttcgccccagtcctcctgcctggagacagttgatgtgtcatgcagagctcttacttctccagcaacactcttcagtacataataagcttaactgataaacagaatatttagaaaggtgagacttgggcttaccattgggtttaaatcatagggacctagggcgagggttcagggcttctctggagcagatattgtcaagttcatggccttaggtagcatgtatctggtcttaactctgattgtagcaaaagttctgagaggagctgagccctgttgtggcccattaaagaacagggtcctcaggccctgcccgcttcctgtccactgccccctccccatccccagcccagccgagggaatcccgtgggttgcttacctacctataaggtggtttataagctgctgtcctggccactgcattcaaattccaatgtgtacttcatagtgtaaaaatttatattattgtgaggttttttgtcttttttttttttttttttttttggtatattgctgtatctactttaacttccagaaataaacgttatataggaaccgtaaaaa

SEQ ID NO: 44-50 - skipped (7 entries)

SEQ ID NO: 51 - DNA, 19438 bp, synthetic construct
  misc_feature 1..19438: note = NRas Genomic Sequence
  source 1..19438: mol_type = other DNA
aaaaaaaaaagtcaggtgtggtggctcacacctgtaaacccaacacttcgggaggccaaggtgggcagatcacttgagcccaggagtttgagaccagcctgggcaacatggcaaaaccctgtctctacaaaaaatgcaaaaattagccagtcatggtgtgtgcctgtagtcccagcgactcaggagctgaggtgggaggatcacccgagcccaggaaatcaaggctgcagtgagccgttgatcgccactgcactccagcctgggtagcagagcgagaccctgtctcaacaataacaatgacaaaaattcttcacttaccctgtaatcatcaagaggatggttagaagcttctgcttcccacctgtttttctcatgttttccactattgttgactgagtacatttgcctggatgctgaaaattgttaggcagctgaattctttggcatagtttttatctgtagcctgcaccgggctccaggcaacttcatactgtagggcagggctcagcatatatggtggccttttcttgtgatcacagccacaaccatttgtttacatattgtttttcgttgctttctcactacaacagcagagttggttagacaggatgacttgcaaacctaaaataatactctccggccctttaggaaaatggtttttggtctctgatctggaaaaaggaacctatgtgagggagccagaattcgaacaaaaaaaaaggaggtggggtgtcaaatttatctaaattgtttttgcctgtgcccgcctagttgtttactggctcattgagtatgggacaaaagtatttttggttggctcatattgtgaacttgggaagaagatagtcctgtgaatattggcaacccatagtgcttaaaatttaggcaatgggattgtaaatgacagtattttttgttttaatttataaatgcagtttaaaattgttcatcagctaataaagtactgatgggagctgtgacattctcatttggttccatggtagtatttaacatttaggatttcatttaagctttaaggtgaaacttctgagtactgaaaatgtaaatatattttaagtaacataacacatttttagcagttatataaacttcctagggtcatcagcagaggactgttgtgaaatactagcttttagactttgtacctgttttacaggcgatatgaaaggtgaggtctatccatttggcatcgttgggatggccaacaaaggggattgcctgcagaaaggggagagcgtcaagttccaattgtgtgtcctgggccaaaatgcacaaactatggcttacaacatcacacccctgcgcagggccacagtggaatgtgtgaaagatcaggtaagtgccagcatctctgtatctgaatttgatccttctatgagttggtaaccaaaaccttcaaatattttcagccaaggggaaatcatcaacattcattcgtttttttatttctacttcaccttttttcagtcatttgaggtagcttaataaaaacagaaaactacacaaaaagtgactatattagcaatgagaaagtaagattggtattagtaactaatattatgcaatggggaaaataagttaggggtgagatttccagaatagaaggactatatggttttgtacacttttgcttagagcttcttttgcatatcacacaaacacagaaaccacgttcaaaagtacttaaaaaataagcttagggcaaacaaacttagtcttactcctgagatctcagggaaatctgagtcctcagaatgtttttcatcagtacagagaataataacattttgtatggctgctactataacccagcttaattctagaggggatccaaacaatatatatgttgaagtaacagcttcctgatgagtttgcttaattcaaaaagcttagttcataatatacgaaggaacaaggcaagttttatttgtttggttcaagtttgtgatatagtgaatggcactttcagagatacatttcttccctgacaggttttgccacaggcagctggactggagtatcaacattaataccatgttttatacatccttttagataggggcaggcattgtgcttcattcagagtgaggtgtggcatgccctctcttttttacctacttttttttttcagtttggcttcattaactatgaagtaggagatagcaagaagctctttttccatgtgaaagaagttcaggatggcattgagctacaggcaggagatgaggtggagttctcagtgattcttaatcagcgcactggcaagtgcagcgcctgtaatgtttggcgagtctggtgagttttgttgttgtggtttgattagtaactaccctggagtgtctcaactttatagtctctgttttgtcacatcacttttctgtgccttgtcttctgccacttattatttcttgatacttcctacttctagttgaatacaaaaagattgtttagtacatgttttttaaaatttttgccaaattcttcttcttccattaagtcatttctaggttatatgctacttaaaattctaatagtttagccatgctgattcataatgccgctttgcttccccagagacagtctcacagtctgattcggttacccaggcgctatcacgactcactgcagactcaaccccctgggcctaagcaattctcccacgtcagcttccccagtagctgggactacaagcatgcgccaccacatgcagccaattttattttttgtagagacatggtcccactgttttgcccaggctgatctcgaacttctgggctcaagtgttcctcctgccctgtcctctcaaagcgctgggattacaggtgttagctaccacatctgctaccttgtttttttatgcatctgtggaactggtcactcttgattgcattcaagtctagggtctgcaaatgattccttccattcctattaagttgggaccttgagttggggataataatacataaacaaacttgtctgtcctgtctttctagctaggtatatgaggcaagagtcccatcataaaaagtgagtcatttgggcagttaggtggaaaacacactcctttgcaagtgcttgctgtctgcccaccaagtgtggtttcttctcatcttttgacttaattacagtgagggccccaaggctgttgcagctcctcgacctgatcggttggtcaatcgcttgaagaatatcactctggatgatgccagtgctcctcgcctaatggttcttcgtcagccaaggggaccagataactcaatggtatgagggcatacaaggcttgggggaggccaactgatagaccaacataaaatatgtggtcctatttaaacaataggtcaggaaacttaatgaagcagggagacttccatattgcttataactagttaggactttctacacattggttcagccccctaacctaatggttgcttacagtaagaagcacatttcttttcttgatgctttgaagacagtttaggtaatgaatgggtcaggagtgcttactgtggattttctcctctaggaaagaattagtactgcataagatgattaaaaataatgcttttgtagtttcatttcggaatagtgaatgtactatgattgttgtgcgctcaaatcattaactgcagggttttttttttctcccccccacaggggtttggtgcagaaagaaagatccgtcaagctggtgtcattgactaaccacatccacaaagcacaccattaatccactatgatcaagttggggggaatctggtgaagggttctgaatatctccctcttcatccctcccgaaatctggaatacttattctattgagctattacaccagttttaacaccttcctcgtgttatgtttaaaaaaataaataaatttaagaaaaccattttaaataatgcacagttgcagcctggaaaaacttaaggtggcgccttatagtatcaattttaggagctttatttggtgcatttaacgcaactggtaattgcagaatccactttgcctgtgtaagtgaaaaatatagactgttatcttgttggccctatgaaattctgcacttttcattatatactctaccttcattaattacttctggcaagatgttctgccttagcactcagttgcattcttttcctttttcttcctgttcattatgctttaattctgaggaccatatgagggtagaatatattatcttttaaaaattacaaaaatttgtataggcaaaccatttcttaaagttgatggccaaattttaaaatgttatttttcatatcatttataatcttgtcacaatccacttaaagaagtttggttatatttcagtgaaaattttcttccagagtaggttttttttcgtgggttggggggtaactttactacaattagtaagtatggtgcagaatttcatgcaaatgaggagtgccagcagtgtgataatttaaacatatttaaacaaaaacaaaaaaaatgaatgcacaaacttgctgctgcttagatcactgcagcttctaggacccggtttcttttactgatttaaaaacaaaacaaaaaaaaataaaaaagttgtgcctgaaatgaatcttgtttttttttataagtagccgcctggttactgtgtcctgtaaaatacagacacttgacccttggtgtagcttctgttcaactttatatcacgggaatggatgggtctgatttcttggccctcttcttgaattggccatatacagggtccctggccagtggactgaaggctttgtctaagatgacaagggtcagctcaggggatgtgggggagggcggttttatcttcccccttgtcgtttgaggttttgatctctgggtaaagaggccgtttatctttgtaaacacgaaacatttttgctttctccagttttctgttaatggcgaaagaatggaagcgaataaagttttactgatttttgagacactagcacctagcgctttcattattgaaacgtcccgtgtgggaggggcgggtctgggtgcggcctgccgcatgactcgtggttcggaggcccacgtggccggggcggggactcaggcgcctggggcgccgactgattacgtagcgggcggggccggaagtgccgctccttggtgggggctgttcatggcggttccggggtctccaacatttttcccggctgtggtcctaaatctgtccaaagcagaggcagtggagcttgaggtaagtttatctcatgcatagtgttcggctttgggctgtggaatgttcaggcgtttcactgatgccagaaatggagcagaatctatcagctggagacaaaggccttgggcgggggtccttccatttggtgcctacgtggggagatctttggagacagaagggagaatgggaaggagttgcggcctggaggcttcctgctagagctgagaagccttcggggagtaataggaagggggatttccattgcttaggctgagggcggggcccaaggactgttgaaaaatagctaaggatgggggttgctagaaaactactccagaagtgtgaggccgatattaatccggtgtttttgcgttctctagtcactttaagaaccaaatggaaggtcacactagggttttcatttccattgattatagaaagctttaaagtactgtagatgtggctcgccaattaaccctgattactggtttccaacaggttcttgctggtgtgaaatgactgagtacaaactggtggtggttggagcaggtggtgttgggaaaagcgcactgacaatccagctaatccagaaccactttgtagatgaatatgatcccaccatagaggtgaggcccagtggtagcccgctgacctgatcctgtctctcacttgtcggatcatctttacccatattctgtattaaaggaataagaggagagaaagtaaaaagttattttgggtatacattcagttatgcaataagcttaacgtgtttatagagaacagttcatttttattagctgctgaagtttctaaaacctgtccagtttttaacagttctgtaaactattgcaaactcagtgttgagttcattcatgagtttcttcatatataacagctctattacatgagaaacacaggccatagtagcgagactgtctgattgtatgggagataataggatggagataaaggattcagagatgagtgttcttcaatatttatttattagctagttgaagcagctgagaccagatgattggagtagcaagaacttgagatttttagtctttatgcctaggattttggtccctgtttgcagtttatttagttgtgtgatattgagcaactgaatctctcccaacctcattttcctcatgttttaaattaccataaacttgtcctgcctaccacacagggatgttatggaaagttaaataatatatttaagttatttatgaatggtaaagcactatgtaatagtacttagggattctattgttattatgagagttcatggtacagattgtcttcagtaagtggcacctaaggctctttaaataaagggttttgccggacacggtggctcacgcctgtaatcccagcactttgggaggctgaggcaggcggatcacaaggtcaggagttcaagaccagcctgatcaacatggtgaaaccccgtctctactaaaaatacaaaaattagctgggtgtggtggcaggcacctgtaatcccagctactcaggaggctgaggcaggagaatcgcttgaaccagaggcagagggtgcagtgagccgagatcacaccacagacctccagcctgggcaacagagcgagacttcgtctcaaaaaataaataaatagataaataaataaagggttttgtaattttgttcagtttagaaatgcctaactttagagattattttaatcaacacctggcctccctaccatctggctactcgtgtttaattgatgaaaactaactctaatgtagccactataaaaaattggttgctaacccttggcaaaatctttattttgagcttaacagctttaatattttacatgaaatgtttaatattttaattaaatatttttaaatgtttgatttattgagcaatttacataagtaaaatacataaattttatgtctacagcccagtgctttttgcgtttctatatagtcatgtagctaccacccagataacagtatagagcacttccagtactccagagagttctccaagtgtgatgacattaaaatacaagtaaaagtcctgttgccataaaaccaaaatgaaagtattttttatatgatctatgcatgtttgtcttcctgagaaattaaacataactataccttgtttggaacctttaagaatttgattcaggaatatttcccaaaggtacatctgtcatgataaaaaaaaaaccttctctgaaacaaaggtatttgtatatttagtcataaacacaaatgatgtatatagggccaggttataattggtggaggtatgtttagatttctttaagtaaaataaacagcacaaataaaacagtccagttcatagcttagtgaaatacactgggtacttaatctgtagcctcctggctgcagtagagttgtcatttgagttactgtgttttcttaatcttttccaggaacacagtgaccatatttcttttctgcaggcatatagaatttggtgggttttcttttatgtagggtgatattggatactttttgtttgtgattatatattagcaatttgagggacaaaccagataggcagaaatgggcttgaatagttagatgcttatttaaccttggcaatagcattgcattccctgtggtttttaataaaaattgaacttccctccctccctgcccccttaccctccacacccccaggattcttacagaaaacaagtggttatagatggtgaaacctgtttgttggacatactggatacagctggacaagaagagtacagtgccatgagagaccaatacatgaggacaggcgaaggcttcctctgtgtatttgccatcaataatagcaagtcatttgcggatattaacctctacaggtactaggagcattattttctctgaaaggatgatctttgtgttctgaatctttatggggaaatgaggttaccacactagggaagatagagctttttaattatgggaagagttggttttaggttgtttgacattgagaatctagggtaattactgaaagttaatactggaatttattttacataatatactgttactataaagtttgataatacataagtgaagcttgctactgggaatgacttggaaccagagttgttgtaattagagatcacgaaggaatttcagagaggaaaacatctccaagaaacatctttcagtatgtaatggaaaagataggccaggcacagtggctcacacctggaatgtcagtgctttgggaggccaaggcgggaggatcactttcagcccaggagttggagaccagcctgggcaacagagcaagaccctgtctctacaaaaataaaaataaaaaaattagtcacacatggtggcagctactcgggaggcagaggtgggaggatcacgtgagctcaggaggtcgaggcatgctcactccactgcactgctgcactccagcctaatcaacagagcaagattctgtctccaaaaaaaataaaaaataaaatgataggagtaagcaaataggaagtccataaagatgaaaacaaagcaagggaacataaagatagactttgtccatagaaccataaagtttcaaagctagattggaccataaaaattctagtacaatattcttattttgcagaatcagaaacagagttcagaatgtcgtttgttaggttttggagtcaggattgttattagtagcagagccaggaccaaaaacccaaagctcctttttcttagcacagtgttcttaaacagaataatataatggttaagaatgagaactctgcctggattgaaacctagctctgtttattagcgacgtgactcaggggctatgtggctttcctaacctataatatggaaataataatacctacctcatagagttgtgaagattacagttttaataaatacgcaaatcactcagaatagtgcctggcacacagtaaatgctacttaagtgttctgcctaaaggcttgagtcttggcttattttctatccatgtgaagatgtctgctctcaaaagcagattggtccaacactgaattcaagtgttcttttcctaacctgttgtacttcccattttttttttgtctaaaagtaatagcagtacttaataaaatgcccacacttggcatgcatctaataaatgttttttgaatttctagaagtcatttttcttctttcttacaagaaatttattcatttttctatatgccttagctcaaaccaaagagtatttaaaacatcttatgaaaatgcatatagtagagcaagataagattaatgaaaaataggcttaagtgagaccaaaaaaataagggtaaaataaacaaatttaggagtgagcatattctgtgattgtgcatgaagttccagtggctttctaaaggtggactacaaatttggtcactgttgtgaaaaggaaagtagccagctgaaagattcagtatctgtatgctgaaagccgttaagttgctcggactagaaggaaattttcccatggatcctcaaagaggcttgtttaatgtaaaaatcagtagtaacctgacagtgacatggtccaggtactttaggctgtcttatcccttaatgtaggctattaccatcaagcacagttttgcaaatagccagtggaatgtagttcagatacatgactttgtgggtaatccaggggtagagactaaaacagtactgtgcagtatgtggttatttacagttaattaagattaaataaaatttaaaaattagttccttgactaccaaatgctcaatagccactagtaggtaccatgttgaacagtacagatatagaccatttccatcatcacataaagtactgttggattgtgttggtcaagacaatctaaagcaattgtttcccaggtgtgctgtgtggtgtgccttacatgtcattgaaaggggtgctgtcaggagttctagatgcttcagcctccctttactaagagcagttcttatgttttctattttatcgcttgggcttccagatacaatgttttgttttaggtttgttttttttgtttgtttgtttttttttttttgagacggagttttgctctggttgcccaagctggatggagtacggtggtgcgatcgcggctcactgcaacctccgcctcccgggttcgagagattctcctgcctcagcttcccgagtagctggaattacaggcgtccaccaccatgcctgactaattttttttgtatttttagtagacttggggtttcaccatgttggccgggctggtttcaaactcctgacctcaggtgatccacccgcctcggcctcccagagggctgggattacaggtgtgaaccaccgtgcccggcctgttttagttttttagagatggagtctccctctgttgcccaagccagagtgcggtggcatgacactctcagggttcaacctctcagggatcaagggatcctcccacctcagcttcctgagtagctggaaccacaggcacatgtgccaccatgcccagctaatttttgtattttttgtagaagcaaggtttcaccatgttgcccaggctggtctcggactcctaggtcaagtgatcctcccacctcaatctcctagagtgctaagactataggcgggagtcaccatgcccagcttcatctacaatttatttgaagaaaatgtttgagcaccacccatcttgaaaagtgatagactgccttccattaaatactgtcacacctagttatttagcagcagtgagcttcactttttatactttagaccttaatctaaagggtgatttctagttgccagttaaatccagagccaagctctttggagaatccaggagcctcactaggtcatgtatcaggataaaatacccatccactcccattagaaggtgagcttgtacttatggcttcctgatggctgctgcaacaagtctaaagcagtctccttagtatacaatgtcttctctaagtggtagaaaaaagcaaaaatactacaagttaatagggctacataaaatttgctagtttcttttttgccctagccatttattccttcctgaaatcttgtctctctctcgctctctctttctctcgctctcactttctttctctttttcttttctcttttcttttctttcttccctttcttttctttcttttttcctgttgcccaggctggagtgcagtggaacaattatggctcactgcagccttgacctttctggacccaggtgatcctcccacctcagtctcccaattagctgggactacaggcatgcgccaccacacccagctataatatatattgtatatatattttttatttataaatatatataaatatatatttatatgtgtaaattatatatatttatatattataaattatatataaatatatatttatatataatatatataatatatatttatttttatatattttatatatattttttggggggggttgggggggatggagtctcactctgtcgcccaggctagagtgtagtggcgtgatcttggctcactgcaatcttcgcctcccaggttcaagcgattctcctgcctcagcttcccgagtagctgggactataggcgcctgccaccacacctggctaatttttgtatttttagtagagatggggtttcaccatattggccaggctggtcttcaactcctgaccttgtgatctgcccacctcaacctcccaaagtgctgggaatacaggcatgagccactgcacccagcctaatctttgtatttttttgtagagaccgggttttgccatgttgcccaggctaatctcaaactcctgggttcaagcagtctgccctcctcagcctcccaaagtgctgagattgcaggcatgagccactgtacccagcctaatcttgtttttcttatgttctgataatatattcccgtttttagggagcagattaagcgagtaaaagactcggatgatgtacctatggtgctagtgggaaacaagtgtgatttgccaacaaggacagttgatacaaaacaagcccacgaactggccaagagttacgggattccattcattgaaacctcagccaagaccagacaggtatggtacagctttcagcatttgtgcaagagtttgcatcagttgattaactctggtagagatgtgatccatattcatattctttgttgttatgcatttttttcatttttatttttttattttttatttttttttaggcagagtctcactctatcttctaagctggagtgcagtggtgtgatctcagctcactgcagcctctgtctcttgggttcaagtgattctcctgcctcagcctcccaagtagctgggactacgggcacatcatcatgcccggctaatttttgtacttttagtagagacagggttttaccatgttgcccaggctggtctcgaactcctggcctcaagcaatcctcccacctgggcctcccagagtgctgggattacaggtgtgagccaccacgcccagcctgttgttaggcatttttagtagtgttctttttcttaacgcttgtttaaacccaaaatgaacttactaatattctgttatggcatgtttactcctgcattaacatccacaaatatttcttgggaagatccttgactaaaaatatttataaacattagttatttctctgtcaacaccagcccgtttatggcttaagcctcctgaatggagtctttagtttaatgtagttttgttccgtgtttctcacattacccttttcctttgcatgaatgtttatttggcaaaatgtgccatttttatatcagcctgttcttgtgattcaataggaatgtgaaatttagtgttctcttccttaaatcaccatattttattttatcagctattcgtttagtaattggaatcttatgtccacataaagagatacaaatgcaagagagcttataatttggattgtgtccgttgagctagctctctcattttttttcattttttccttttatagggtgttgaagatgctttttacacactggtaagagaaatacgccagtaccgaatgaaaaaactcaacagcagtgatgatgggactcagggttgtatgggattgccatgtgtggtgatgtaacaaggtgagcatatggtttcttggcataattacaaatcttagtatatagtattgggcaatttggaggagtgctggtgttattgtctatatgttttttgagtttctgcctatcctcttctgcacattttccatatgacaccctttctgaaagtactgaggtctaaagtgtttaaaacatttgattattccacaggtatctttatatttttggtaacattagaaattataagacattatttatgaaatgtaggcataccctattcctggcaatgaccaggaatttgaaggatcactactttgaaactagttaataaggacatggtttctgttctttttttacagatacttttaaagttttgtcagaaaagagccactttcaaggtaggacaagtttggaaatgtattctcattcctgttaattttgtatatttgtttttcttatactctgaatgtgtcacttatacaaattctgtttctatttcagctgcactgacaccctggtcctgacttccctggaggagaagtattcctgttgctgtcttcagtctcacagagaagctcctgctacttccccagctctcagtagtttagtacaataatctctatttgagaagttctcagaataactacctcctcacttggctgtctgaccagagaatgcacctcttgttactccctgttatttttctgccctgggttcttccacagcacaaacacacctctgccaccccaggtttttcatctgaaaagcagttcatgtctgaaacagagaaccaaaccgcaaacgtgaaattctattgaaaacagtgtcttgagctctaaagtagcaactgctggtgattttttttttctttttactgttgaacttagaactatgctaatttttggagaaatgtcataaattactgttttgccaagaatatagttattattgctgtttggtttgtttataatgttatcggctctattctctaaactggcatctgctctagattcataaatacaaaaatgaatactgaattttgagtctatcctagtcttcacaactttgacgtaattaaatccaactttcacagtgaagtgcctttttcctagaagtggtttgtagacttcctttataatatttcagtggaatagatgtctcaaaaatccttatgcatgaaatgaatgtctgagatacgtctgtgacttatctaccattgaaggaaagctatatctatttgagagcagatgccattttgtacatgtatgaaattggttttccagaggcctgttttggggctttcccaggagaaagatgaaactgaaagcacatgaataatttcacttaataatttttacctaatctccacttttttcataggttactacctatacaatgtatgtaatttgtttcccctagcttactgataaacctaatattcaatgaacttccatttgtattcaaatttgtgtcataccagaaagctctacatttgcagatgttcaaatattgtaaaactttggtgcattgttatttaatagctgtgatcagtgattttcaaacctcaaatatagtatattaacaaattacattttcactgtatatcatggtatcttaatgatgtatataattgccttcaatccccttctcaccccaccctctacagcttcccccacagcaataggggcttgattatttcagttgagtaaagcatggtgctaatggaccagggtcacagtttcaaaacttgaacaatccagttagcatcacagagaaagaaattcttctgcatttgctcattgcaccagtaactccagctagtaattttgctaggtagctgcagttagccctgcaaggaaagaagaggtcagttagcacaaaccctttaccatgactggaaaactcagtatcacgtatttaaacatttttttttcttttagccatgtagaaactctaaattaagccaatattctcatttgagaatgaggatgtctcagctgagaaacgttttaaattctctttattcataatgttctttgaagggtttaaaacaagatgttgataaatctaagctgatgagtttgctcaaaacaggaagttgaaattgttgagacaggaatggaaaatataattaattgatacctatgaggatttggaggcttggcattttaatttgcagataataccctggtaattctcatgaaaaatagacttggataacttttgataaaagactaattccaaaatggccactttgttcctgtctttaatatctaaatacttactgaggtcctccatcttctatattatgaattttcatttattaagcaaatgtcatattaccttgaaattcagaagagaagaaacatatactgtgtccagagtataatgaacctgcagagttgtgcttcttactgctaattctgggagctttcacagtactgtcatcatttgtaaatggaaattctgcttttctgtttctgctccttctggagcagtgctactctgtaattttcctgaggcttatcacctcagtcatttcttttttaaatgtctgtgactggcagtgattctttttcttaaaaatctattaaatttgatgtcaaattagggagaaagatagttactcatcttgggctcttgtgccaatagcccttgtatgtatgtacttagagttttccaagtatgttctaagcacagaagtttctaaatggggccaaaattcagacttgagtatgttctttgaataccttaagaagttacaattagccgggcatggtggcccgtgcctgtagtcccagctacttgagaggctgaggcaggagaatcacttcaacccaggaggtggaggttacagtgagcagagatcgtgccactgcactccagcctgggtgacaagagagacttgtctccaaaaaaaaagttacacctaggtgtgaattttggcacaaaggagtgacaaacttatagttaaaagctgaataacttcagtgtggtataaaacgtggtttttaggctatgtttgtgattgctgaaaagaattctagtttacctcaaaatccttctctttccccaaattaagtgcctggccagctgtcataaattacatattccttttggtttttttaaaggttacatgttcaagagtgaaaataagatgttctgtctgaaggctaccatgccggatctgtaaatgaacctgttaaatgctgtatttgctccaacggcttactatagaatgttacttaatacaatatcatacttattacaatttttactataggagtgtaataggtaaaattaatctctattttagtgggcccatgtttagtctttcaccatcctttaaactgctgtgaatttttttgtcatgacttgaaagcaaggatagagaaacactttagagatatgtggggtttttttaccattccagagcttgtgagcataatcatatttgctttatatttatagtcatgaactcctaagttggcagctacaaccaagaaccaaaaaatggtgcgttctgcttcttgtaattcatctctgctaataaattataagaagcaaggaaaattagggaaaatattttatttggatggtttctataaacaagggactataattcttgtacattatttttcatctttgctgtttctttgagcagtctaatgtgccacacaattatctaaggtatttgttttctataagaattgttttaaaagtattcttgttaccagagtagttgtattatatttcaaaacgtaagatgatttttaaaagcctgagtactgacctaagatggaattgtatgaactctgctctggagggaggggaggatgtccgtggaagttgtaagacttttatttttttgtgccatcaaatataggtaaaaataattgtgcaattctgctgtttaaacaggaactattggcctccttggccctaaatggaagggccgatattttaagttgattattttattgtaaattaatccaacctagttctttttaatttggttgaatgttttttcttgttaaatgatgtttaaaaaataaaaactggaagttcttggcttagtcataattcttatattcactgaagtgcctttatagaatgctaatattaatttcaaacttttggatgtgacatttggaagtgttggaatatctgagttcctcatttcatcataacatcaaatatatcaaagcctgctttaaagtattaccttggggatgattcatagctatttgtcagatttgcatacattaagatgccattggagctcttttgtctcgtttttgcattactgcacaatctagccatcttggtataggtggaggagcattgatgctaggggctggagaacttgaggcccgatataattttactacgccggcccagtttcttcaattgcaaaatagaagagttgaattaggatatatcagatttcccaaccttaaggagactttaaaaagaataatatcaaacctaggcattttcaactaacactggaatactaattttggagaccttggtttactctaccaaagacatcaaaattttttttcacttttttttcttgaaaaggaggcagggaaggtaggtcattaacatgtggctgaagtaagcttgggaaaaccaattttaaatgacaatattttttctagctaggacaactagaaagagtaaatattttaattataaaatgtatttgaaaaagaaatagaattagggaatttgtatctttcaaactatcacctcatatagagacctaggtgatagtttgagagagaaacatacaaagtccacagttctatttctttttcatatacattttacaaaaatttgttctaatgtttgaccctctaataacggaaaagaggaaaggatgttttctggtgagaactgctgttctgttcagcaaaataaagctacagaaacaaataatgagaaggtacctaaagaagcttgtttatttggaatatgagggaaccacctgtgcatctctgtgctattaaggtttctgttctcataagcaatatttaaggtcactgaaaggccaacatagttgcatgagttatttgatacccataaatacatgagaagaggccaagaggccttgctagtgatcatttcgcaaaactgtctgaggatgtccagctccatgagagcacagagagaatcactgtccagtttccaagtgggaagggtatgctttgtaatgcttttaaaagtaactgggcagtgaaatgtgaccctttaccttaataaaagacagctggaacttcaggaacatacaaaatagaaatattctttccagttgcaaaaggaacataagagggttcagattcatgaaccaagagttgagttgaccattcttatttgcagttgaattctaccatatgatttacttcacacttgcaccgaaatagtctattataaactactggtgttgggggtggggcgggagtgggaatggggaatgaaggggaggaatgaacttagtttcttaactagtataaattcagattaccatcaacttgtagaagccatatgaagtaaaaatgggtagcacctgcaacactgggacttagcgtgctattaaatgtttctaaagatagaggcacgtagctacatgtctcataggggaggatgtggttgtagctagcagttgcctactagcaggcttctttatttgcagcagcctgaaatacccaggttaggaaaagcaatcttccagaatggatgctgtggacatggtacaattggcgctattgatactttctgtaggagcttgaaatgtgtggattgtagttaagtctgaaagaaaacttgcacttgattttaaaacattttcttataaatcaattcacatttataactgagacccaacattcctgataggaatatttttgtaaatcaatggtatgaagtgtaaagacatgttgaaagttagaagaagagatcttttaagtgtatgcttgttttggctgtgaagctgaggggtttgacatttactattaaagttcaaaataaaactagcatggcatatgaagtagaattaccaaggcctgtgtttctctaagagaaccata

SEQ ID NO: 52 - protein, 189 aa, synthetic construct
  REGION 1..189: note = NRas Amino Acid Sequence
MTEYKLVVVGAGGVGKSALTIQLIQNHFVDEYDPTIEDSYRKQVVIDGETCLLDILDTAGQEEYSAMRDQYMRTGEGFLCVFAINNSKSFADINLYREQIKRVKDSDDVPMVLVGNKCDLPTRTVDTKQAHELAKSYGIPFIETSAKTRQGVEDAFYTLVREIRQYRMKKLNSSDDGTQGCMGLPCVVM

SEQ ID NO: 53 - DNA, 4326 bp, synthetic construct
  misc_feature 1..4326: note = Synthetic
  source 1..4326: mol_type = other DNA
ggggccggaagtgccgctccttggtgggggctgttcatggcggttccggggtctccaacatttttcccggctgtggtcctaaatctgtccaaagcagaggcagtggagcttgaggttcttgctggtgtgaaatgactgagtacaaactggtggtggttggagcaggtggtgttgggaaaagcgcactgacaatccagctaatccagaaccactttgtagatgaatatgatcccaccatagaggattcttacagaaaacaagtggttatagatggtgaaacctgtttgttggacatactggatacagctggacaagaagagtacagtgccatgagagaccaatacatgaggacaggcgaaggcttcctctgtgtatttgccatcaataatagcaagtcatttgcggatattaacctctacagggagcagattaagcgagtaaaagactcggatgatgtacctatggtgctagtgggaaacaagtgtgatttgccaacaaggacagttgatacaaaacaagcccacgaactggccaagagttacgggattccattcattgaaacctcagccaagaccagacagggtgttgaagatgctttttacacactggtaagagaaatacgccagtaccgaatgaaaaaactcaacagcagtgatgatgggactcagggttgtatgggattgccatgtgtggtgatgtaacaagatacttttaaagttttgtcagaaaagagccactttcaagctgcactgacaccctggtcctgacttccctggaggagaagtattcctgttgctgtcttcagtctcacagagaagctcctgctacttccccagctctcagtagtttagtacaataatctctatttgagaagttctcagaataactacctcctcacttggctgtctgaccagagaatgcacctcttgttactccctgttatttttctgccctgggttcttccacagcacaaacacacctctgccaccccaggtttttcatctgaaaagcagttcatgtctgaaacagagaaccaaaccgcaaacgtgaaattctattgaaaacagtgtcttgagctctaaagtagcaactgctggtgattttttttttctttttactgttgaacttagaactatgctaatttttggagaaatgtcataaattactgttttgccaagaatatagttattattgctgtttggtttgtttataatgttatcggctctattctctaaactggcatctgctctagattcataaatacaaaaatgaatactgaattttgagtctatcctagtcttcacaactttgacgtaattaaatccaactttcacagtgaagtgcctttttcctagaagtggtttgtagacttcctttataatatttcagtggaatagatgtctcaaaaatccttatgcatgaaatgaatgtctgagatacgtctgtgacttatctaccattgaaggaaagctatatctatttgagagcagatgccattttgtacatgtatgaaattggttttccagaggcctgttttggggctttcccaggagaaagatgaaactgaaagcacatgaataatttcacttaataatttttacctaatctccacttttttcataggttactacctatacaatgtatgtaatttgtttcccctagcttactgataaacctaatattcaatgaacttccatttgtattcaaatttgtgtcataccagaaagctctacatttgcagatgttcaaatattgtaaaactttggtgcattgttatttaatagctgtgatcagtgattttcaaacctcaaatatagtatattaacaaattacattttcactgtatatcatggtatcttaatgatgtatataattgccttcaatccccttctcaccccaccctctacagcttcccccacagcaataggggcttgattatttcagttgagtaaagcatggtgctaatggaccagggtcacagtttcaaaacttgaacaatccagttagcatcacagagaaagaaattcttctgcatttgctcattgcaccagtaactccagctagtaattttgctaggtagctgcagttagccctgcaaggaaagaagaggtcagttagcacaaaccctttaccatgactggaaaactcagtatcacgtatttaaacatttttttttcttttagccatgtagaaactctaaattaagccaatattctcatttgagaatgaggatgtctcagctgagaaacgttttaaattctctttattcataatgttctttgaagggtttaaaacaagatgttgataaatctaagctgatgagtttgctcaaaacaggaagttgaaattgttgagacaggaatggaaaatataattaattgatacctatgaggatttggaggcttggcattttaatttgcagataataccctggtaattctcatgaaaaatagacttggataacttttgataaaagactaattccaaaatggccactttgttcctgtctttaatatctaaatacttactgaggtcctccatcttctatattatgaattttcatttattaagcaaatgtcatattaccttgaaattcagaagagaagaaacatatactgtgtccagagtataatgaacctgcagagttgtgcttcttactgctaattctgggagctttcacagtactgtcatcatttgtaaatggaaattctgcttttctgtttctgctccttctggagcagtgctactctgtaattttcctgaggcttatcacctcagtcatttcttttttaaatgtctgtgactggcagtgattctttttcttaaaaatctattaaatttgatgtcaaattagggagaaagatagttactcatcttgggctcttgtgccaatagcccttgtatgtatgtacttagagttttccaagtatgttctaagcacagaagtttctaaatggggccaaaattcagacttgagtatgttctttgaataccttaagaagttacaattagccgggcatggtggcccgtgcctgtagtcccagctacttgagaggctgaggcaggagaatcacttcaacccaggaggtggaggttacagtgagcagagatcgtgccactgcactccagcctgggtgacaagagagacttgtctccaaaaaaaaagttacacctaggtgtgaattttggcacaaaggagtgacaaacttatagttaaaagctgaataacttcagtgtggtataaaacgtggtttttaggctatgtttgtgattgctgaaaagaattctagtttacctcaaaatccttctctttccccaaattaagtgcctggccagctgtcataaattacatattccttttggtttttttaaaggttacatgttcaagagtgaaaataagatgttctgtctgaaggctaccatgccggatctgtaaatgaacctgttaaatgctgtatttgctccaacggcttactatagaatgttacttaatacaatatcatacttattacaatttttactataggagtgtaataggtaaaattaatctctattttagtgggcccatgtttagtctttcaccatcctttaaactgctgtgaatttttttgtcatgacttgaaagcaaggatagagaaacactttagagatatgtggggtttttttaccattccagagcttgtgagcataatcatatttgctttatatttatagtcatgaactcctaagttggcagctacaaccaagaaccaaaaaatggtgcgttctgcttcttgtaattcatctctgctaataaattataagaagcaaggaaaattagggaaaatattttatttggatggtttctataaacaagggactataattcttgtacattatttttcatctttgctgtttctttgagcagtctaatgtgccacacaattatctaaggtatttgttttctataagaattgttttaaaagtattcttgttaccagagtagttgtattatatttcaaaacgtaagatgatttttaaaagcctgagtactgacctaagatggaattgtatgaactctgctctggagggaggggaggatgtccgtggaagttgtaagacttttatttttttgtgccatcaaatataggtaaaaataattgtgcaattctgctgtttaaacaggaactattggcctccttggccctaaatggaagggccgatattttaagttgattattttattgtaaattaatccaacctagttctttttaatttggttgaatgttttttcttgttaaatgatgtttaaaaaataaaaactggaagttcttggcttagtcataa

SEQ ID NO: 54 - RNA, 22 nt, synthetic construct
  misc_feature 1..22: note = miR146a-5p
  source 1..22: mol_type = other RNA
tgagaactgaattccatgggtt

SEQ ID NO: 55 - RNA, 22 nt, synthetic construct
  misc_feature 1..22: note = miR146a-3p
  source 1..22: mol_type = other RNA
cctctgaaattcagttcttcag

SEQ ID NO: 56 - RNA, 23 nt, synthetic construct
  misc_feature 1..23: note = miR155-5p
  source 1..23: mol_type = other RNA
ttaatgctaatcgtgataggggt

SEQ ID NO: 57 - RNA, 22 nt, synthetic construct
  misc_feature 1..22: note = miR155-3p
  source 1..22: mol_type = other RNA
ctcctacatattagcattaaca

SEQ ID NO: 58 - DNA, 1828 bp, synthetic construct
  misc_feature 1..1828: note = Pmp22 mRNA
  source 1..1828: mol_type = other DNA
agttacagggagcaccaccagggaacatctcggggagcctggttggaagctgcaggcttagtctgtcggctgcgggtctctgactgccctgtggggagggtcttgccttaacatcccttgcatttggctgcaaagaaatctgcttggaagaaggggttacgctgtttggccgggcagaaactccgctgagcagaacttgccgccagaatgctcctcctgttgctgagtatcatcgtcctccacgtcgcggtgctggtgctgctgttcgtctccacgatcgtcagccaatggatcgtgggcaatggacacgcaactgatctctggcagaactgtagcacctcttcctcaggaaatgtccaccactgtttctcatcatcaccaaacgaatggctgcagtctgtccaggccaccatgatcctgtcgatcatcttcagcattctgtctctgttcctgttcttctgccaactcttcaccctcaccaaggggggcaggttttacatcactggaatcttccaaattcttgctggtctgtgcgtgatgagtgctgcggccatctacacggtgaggcacccggagtggcatctcaactcggattactcctacggtttcgcctacatcctggcctgggtggccttccccctggcccttctcagcggtgtcatctatgtgatcttgcggaaacgcgaatgaggcgcccagacggtctgtctgaggctctgagcgtacatagggaagggaggaagggaaaacagaaagcagacaaagaaaaaagagctagcccaaaatcccaaactcaaaccaaaccaaacagaaagcagtggaggtgggggttgctgttgattgaagatgtatataatatctccggtttataaaacctatttataacactttttacatatatgtacatagtattgtttgctttttatgttgaccatcagcctcgtgttgagccttaaagaagtagctaaggaactttacatcctaacagtataatccagctcagtatttttgttttgttttttgtttgtttgttttgttttacccagaaataagataactccatctcgccccttccctttcatctgaaagaagatacctccctcccagtccacctcatttagaaaaccaaagtgtgggtagaaaccccaaatgtccaaaagcccttttctggtgggtgacccagtgcatccaacagaaacagccgctgcccgaacctctgtgtgaagctttacgcgcacacggacaaaatgcccaaactggagcccttgcaaaaacacggcttgtggcattggcatacttgcccttacaggtggagtatcttcgtcacacatctaaatgagaaatcagtgacaacaagtctttgaaatggtgctatggatttaccattccttattatcactaatcatctaaacaactcactggaaatccaattaacaattttacaacataagatagaatggagacctgaataattctgtgtaatataaatggtttataactgcttttgtacctagctaggctgctattattactataatgagtaaatcataaagccttcatcactcccacatttttcttacggtcggagcatcagaacaagcgtctagactccttgggaccgtgagttcctagagcttggctgggtctaggctgttctgtgcctccaaggactgtctggcaatgacttgtattggccaccaactgtagatgtatatatggtgcccttctgatgctaagactccagaccttttgtttttgctttgcattttctgattttataccaactgtgtggactaagatgcattaaaataaacatcagagtaactca

SEQ ID NO: 59 - DNA, 483 bp, synthetic construct
  misc_feature 1..483: note = Pmp22 Coding sequence
  source 1..483: mol_type = other DNA
atgctcctcctgttgctgagtatcatcgtcctccacgtcgcggtgctggtgctgctgttcgtctccacgatcgtcagccaatggatcgtgggcaatggacacgcaactgatctctggcagaactgtagcacctcttcctcaggaaatgtccaccactgtttctcatcatcaccaaacgaatggctgcagtctgtccaggccaccatgatcctgtcgatcatcttcagcattctgtctctgttcctgttcttctgccaactcttcaccctcaccaaggggggcaggttttacatcactggaatcttccaaattcttgctggtctgtgcgtgatgagtgctgcggccatctacacggtgaggcacccggagtggcatctcaactcggattactcctacggtttcgcctacatcctggcctgggtggccttccccctggcccttctcagcggtgtcatctatgtgatcttgcggaaacgcgaatga

SEQ ID NO: 60 - protein, 160 aa, synthetic construct
  REGION 1..160: note = Pmp protein sequence
MLLLLLSIIVLHVAVLVLLFVSTIVSQWIVGNGHATDLWQNCSTSSSGNVHHCFSSSPNEWLQSVQATMILSIIFSILSLFLFFCQLFTLTKGGRFYITGIFQILAGLCVMSAAAIYTVRHPEWHLNSDYSYGFAYILAWVAFPLALLSGVIYVILRKRE

SEQ ID NO: 61 - DNA, 16 bp, synthetic construct
  misc_feature 1..16: note = Nucleic Acid Sequence
  source 1..16: mol_type = other DNA
atcttcaatcaacagc

SEQ ID NO: 62 - DNA, 17 bp, synthetic construct
  misc_feature 1..17: note = Antisense Oligonucleotide
  source 1..17: mol_type = other DNA
caaacagcgtaacccct

SEQ ID NO: 63 - DNA, 20 bp, synthetic construct
  misc_feature 1..20: note = Antisense Oligonucleotide
  source 1..20: mol_type = other DNA
cgtggaggacgatgatactc

SEQ ID NO: 64 - DNA, 20 bp, synthetic construct
  misc_feature 1..20: note = Antisense Oligonucleotide
  source 1..20: mol_type = other DNA
gacgtggaggacgatgatac

SEQ ID NO: 65 - DNA, 20 bp, synthetic construct
  misc_feature 1..20: note = Antisense Oligonucleotide
  source 1..20: mol_type = other DNA
agcaccgcgacgtggaggac

SEQ ID NO: 66 - DNA, 20 bp, synthetic construct
  misc_feature 1..20: note = Antisense Oligonucleotide
  source 1..20: mol_type = other DNA
ctgacgatcgtggagacgaa

SEQ ID NO: 67 - DNA, 20 bp, synthetic construct
  misc_feature 1..20: note = Antisense Oligonucleotide
  source 1..20: mol_type = other DNA
cattggctgacgatcgtgga

SEQ ID NO: 68 - DNA, 20 bp, synthetic construct
  misc_feature 1..20: note = Antisense Oligonucleotide
  source 1..20: mol_type = other DNA
agactgcagccattcgtttg

SEQ ID NO: 69 - DNA, 20 bp, synthetic construct
  misc_feature 1..20: note = Antisense Oligonucleotide
  source 1..20: mol_type = other DNA
gacagactgcagccattcgt

SEQ ID NO: 70 - DNA, 20 bp, synthetic construct
  misc_feature 1..20: note = Antisense Oligonucleotide
  source 1..20: mol_type = other DNA
tggacagactgcagccattc

SEQ ID NO: 71 - DNA, 20 bp, synthetic construct
  misc_feature 1..20: note = Antisense Oligonucleotide
  source 1..20: mol_type = other DNA
atgctgaagatgatcgacag

SEQ ID NO: 72 - DNA, 20 bp, synthetic construct
  misc_feature 1..20: note = Antisense Oligonucleotide
  source 1..20: mol_type = other DNA
gtaaaacctgccccccttgg

SEQ ID NO: 73 - DNA, 20 bp, synthetic construct
  misc_feature 1..20: note = Antisense Oligonucleotide
  source 1..20: mol_type = other DNA
taggagtaatccgagttgag

SEQ ID NO: 74 - DNA, 20 bp, synthetic construct
  misc_feature 1..20: note = Antisense Oligonucleotide
  source 1..20: mol_type = other DNA
tcattcgcgtttccgcaaga

SEQ ID NO: 75 - DNA, 20 bp, synthetic construct
  misc_feature 1..20: note = Antisense Oligonucleotide
  source 1..20: mol_type = other DNA
ctcattcgcgtttccgcaag

SEQ ID NO: 76 - DNA, 20 bp, synthetic construct
  misc_feature 1..20: note = Antisense Oligonucleotide
  source 1..20: mol_type = other DNA
cctcattcgcgtttccgcaa

SEQ ID NO: 77 - DNA, 20 bp, synthetic construct
  misc_feature 1..20: note = Antisense Oligonucleotide
  source 1..20: mol_type = other DNA
gcctcattcgcgtttccgca

SEQ ID NO: 78 - DNA, 17 bp, synthetic construct
  misc_feature 1..17: note = Antisense Oligonucleotide
  source 1..17: mol_type = other DNA
ctcattcgcgtttccgc

SEQ ID NO: 79 - DNA, 16 bp, synthetic construct
  misc_feature 1..16: note = Antisense Oligonucleotide
  source 1..16: mol_type = other DNA
ctcattcgcgtttccg

SEQ ID NO: 80 - DNA, 16 bp, synthetic construct
  misc_feature 1..16: note = Antisense Oligonucleotide
  source 1..16: mol_type = other DNA
gcctcattcgcgtttc

SEQ ID NO: 81 - DNA, 20 bp, synthetic construct
  misc_feature 1..20: note = Antisense Oligonucleotide
  source 1..20: mol_type = other DNA
ctttaaggctcaacacgagg

SEQ ID NO: 82 - DNA, 20 bp, synthetic construct
  misc_feature 1..20: note = Antisense Oligonucleotide
  source 1..20: mol_type = other DNA
tctttaaggctcaacacgag

SEQ ID NO: 83 - DNA, 20 bp, synthetic construct
  misc_feature 1..20: note = Antisense Oligonucleotide
  source 1..20: mol_type = other DNA
gggtttctacccacactttg

SEQ ID NO: 84 - DNA, 20 bp, synthetic construct
  misc_feature 1..20: note = Antisense Oligonucleotide
  source 1..20: mol_type = other DNA
ttggggtttctacccacact

SEQ ID NO: 85 - DNA, 20 bp, synthetic construct
  misc_feature 1..20: note = Antisense Oligonucleotide
  source 1..20: mol_type = other DNA
cacctgtaagggcaagtatg

SEQ ID NO: 86 - DNA, 20 bp, synthetic construct
  misc_feature 1..20: note = Antisense Oligonucleotide
  source 1..20: mol_type = other DNA
ttagatgtgtgacgaagata

SEQ ID NO: 87 - DNA, 20 bp, synthetic construct
  misc_feature 1..20: note = Antisense Oligonucleotide
  source 1..20: mol_type = other DNA
tttagatgtgtgacgaagat

SEQ ID NO: 88 - DNA, 20 bp, synthetic construct
  misc_feature 1..20: note = Antisense Oligonucleotide
  source 1..20: mol_type = other DNA
catttagatgtgtgacgaag

SEQ ID NO: 89 - DNA, 20 bp, synthetic construct
  misc_feature 1..20: note = Antisense Oligonucleotide
  source 1..20: mol_type = other DNA
ggtaaatccatagcaccatt

SEQ ID NO: 90 - DNA, 20 bp, synthetic construct
  misc_feature 1..20: note = Antisense Oligonucleotide
  source 1..20: mol_type = other DNA
tccagtgagttgtttagatg

SEQ ID NO: 91 - DNA, 20 bp, synthetic construct
  misc_feature 1..20: note = Antisense Oligonucleotide
  source 1..20: mol_type = other DNA
cacggtcccaaggagtctag

SEQ ID NO: 92 - DNA, 20 bp, synthetic construct
  misc_feature 1..20: note = Antisense Oligonucleotide
  source 1..20: mol_type = other DNA
tcacggtcccaaggagtcta

SEQ ID NO: 93 - DNA, 20 bp, synthetic construct
  misc_feature 1..20: note = Antisense Oligonucleotide
  source 1..20: mol_type = other DNA
aggaactcacggtcccaagg

SEQ ID NO: 94 - DNA, 20 bp, synthetic construct
  misc_feature 1..20: note = Antisense Oligonucleotide
  source 1..20: mol_type = other DNA
taggaactcacggtcccaag

SEQ ID NO: 95 - DNA, 20 bp, synthetic construct
  misc_feature 1..20: note = Antisense Oligonucleotide
  source 1..20: mol_type = other DNA
gtggccaatacaagtcattg

SEQ ID NO: 96-100 - skipped (5 entries)

SEQ ID NO: 101 - DNA, 20 bp, synthetic construct
  misc_feature 1..20: note = Antisense Oligonucleotide
  source 1..20: mol_type = other DNA
ggctcgatccaggagtgtgt

SEQ ID NO: 102 - DNA, 20 bp, synthetic construct
  misc_feature 1..20: note = Antisense Oligonucleotide
  source 1..20: mol_type = other DNA
ttggctcgatccaggagtgt

SEQ ID NO: 103 - DNA, 20 bp, synthetic construct
  misc_feature 1..20: note = Antisense Oligonucleotide
  source 1..20: mol_type = other DNA
ctcctgttggctcgatccag

SEQ ID NO: 104 - DNA, 20 bp, synthetic construct
  misc_feature 1..20: note = Antisense Oligonucleotide
  source 1..20: mol_type = other DNA
gcgggtgcttgccatcttca

SEQ ID NO: 105 - DNA, 20 bp, synthetic construct
  misc_feature 1..20: note = Antisense Oligonucleotide
  source 1..20: mol_type = other DNA
ggatagtcctctaagtgcat

SEQ ID NO: 106 - DNA, 20 bp, synthetic construct
  misc_feature 1..20: note = Antisense Oligonucleotide
  source 1..20: mol_type = other DNA
ggctagatccacatggtctg

SEQ ID NO: 107 - DNA, 20 bp, synthetic construct
  misc_feature 1..20: note = Antisense Oligonucleotide
  source 1..20: mol_type = other DNA
tagcgtggctagatccacat

SEQ ID NO: 108 - DNA, 20 bp, synthetic construct
  misc_feature 1..20: note = Antisense Oligonucleotide
  source 1..20: mol_type = other DNA
ttagcgtggctagatccaca

SEQ ID NO: 109 - DNA, 20 bp, synthetic construct
  misc_feature 1..20: note = Antisense Oligonucleotide
  source 1..20: mol_type = other DNA
attagcgtggctagatccac

SEQ ID NO: 110 - DNA, 20 bp, synthetic construct
  misc_feature 1..20: note = Antisense Oligonucleotide
  source 1..20: mol_type = other DNA
tcattagcgtggctagatcc

SEQ ID NO: 111 - DNA, 20 bp, synthetic construct
  misc_feature 1..20: note = Antisense Oligonucleotide
  source 1..20: mol_type = other DNA
atcattagcgtggctagatc

SEQ ID NO: 112 - DNA, 20 bp, synthetic construct
  misc_feature 1..20: note = Antisense Oligonucleotide
  source 1..20: mol_type = other DNA
gcgaagatccacacggccat

SEQ ID NO: 113 - DNA, 20 bp, synthetic construct
  misc_feature 1..20: note = Antisense Oligonucleotide
  source 1..20: mol_type = other DNA
atcgcagcgaagatccacac

SEQ ID NO: 114 - DNA, 20 bp, synthetic construct
  misc_feature 1..20: note = Antisense Oligonucleotide
  source 1..20: mol_type = other DNA
gttgatcgcagcgaagatcc

SEQ ID NO: 115 - DNA, 20 bp, synthetic construct
  misc_feature 1..20: note = Antisense Oligonucleotide
  source 1..20: mol_type = other DNA
ctgttgatcgcagcgaagat

SEQ ID NO: 116 - DNA, 20 bp, synthetic construct
  misc_feature 1..20: note = Antisense Oligonucleotide
  source 1..20: mol_type = other DNA
ctcctgttgatcgcagcgaa

SEQ ID NO: 117 - DNA, 20 bp, synthetic construct
  misc_feature 1..20: note = Antisense Oligonucleotide
  source 1..20: mol_type = other DNA
tctcctgttgatcgcagcga

SEQ ID NO: 118 - DNA, 20 bp, synthetic construct
  misc_feature 1..20: note = Antisense Oligonucleotide
  source 1..20: mol_type = other DNA
ctctcctgttgatcgcagcg

SEQ ID NO: 119 - DNA, 20 bp, synthetic construct
  misc_feature 1..20: note = Antisense Oligonucleotide
  source 1..20: mol_type = other DNA
ctgaaccccacttcggctca

SEQ ID NO: 120 - DNA, 20 bp, synthetic construct
  misc_feature 1..20: note = Antisense Oligonucleotide
  source 1..20: mol_type = other DNA
attatctgaaccccacttcg

SEQ ID NO: 121 - DNA, 20 bp, synthetic construct
  misc_feature 1..20: note = Antisense Oligonucleotide
  source 1..20: mol_type = other DNA
cacgtgcattatctgaaccc

SEQ ID NO: 122 - DNA, 20 bp, synthetic construct
  misc_feature 1..20: note = Antisense Oligonucleotide
  source 1..20: mol_type = other DNA
tcgaaaggtactccagtaaa

SEQ ID NO: 123 - DNA, 20 bp, synthetic construct
  misc_feature 1..20: note = Antisense Oligonucleotide
  source 1..20: mol_type = other DNA
gattctcgaaaggtactcca

SEQ ID NO: 124 - DNA, 20 bp, synthetic construct
  misc_feature 1..20: note = Antisense Oligonucleotide
  source 1..20: mol_type = other DNA
atagagattctcgaaaggta

SEQ ID NO: 125 - DNA, 20 bp, synthetic construct
  misc_feature 1..20: note = Antisense Oligonucleotide
  source 1..20: mol_type = other DNA
cacgtactttctgtacttct

SEQ ID NO: 126 - DNA, 20 bp, synthetic construct
  misc_feature 1..20: note = Antisense Oligonucleotide
  source 1..20: mol_type = other DNA
tggaatctgcttctcacgta

SEQ ID NO: 127 - DNA, 20 bp, synthetic construct
  misc_feature 1..20: note = Antisense Oligonucleotide
  source 1..20: mol_type = other DNA
cgggcattcctgtcttcaat

SEQ ID NO: 128 - DNA, 20 bp, synthetic construct
  misc_feature 1..20: note = Antisense Oligonucleotide
  source 1..20: mol_type = other DNA
acccagacgggcattcctgt

SEQ ID NO: 129 - DNA, 20 bp, synthetic construct
  misc_feature 1..20: note = Antisense Oligonucleotide
  source 1..20: mol_type = other DNA
cgtttgttgaggctcacact

SEQ ID NO: 130 - DNA, 20 bp, synthetic construct
  misc_feature 1..20: note = Antisense Oligonucleotide
  source 1..20: mol_type = other DNA
tgtagcgtttgttgaggctc

SEQ ID NO: 131 - DNA, 20 bp, synthetic construct
  misc_feature 1..20: note = Antisense Oligonucleotide
  source 1..20: mol_type = other DNA
agtcgtgtgtagcgtttgtt

SEQ ID NO: 132 - DNA, 20 bp, synthetic construct
  misc_feature 1..20: note = Antisense Oligonucleotide
  source 1..20: mol_type = other DNA
cagtcgtgtgtagcgtttgt

SEQ ID NO: 133 - DNA, 20 bp, synthetic construct
  misc_feature 1..20: note = Antisense Oligonucleotide
  source 1..20: mol_type = other DNA
gcagtcgtgtgtagcgtttg

SEQ ID NO: 134 - DNA, 20 bp, synthetic construct
  misc_feature 1..20: note = Antisense Oligonucleotide
  source 1..20: mol_type = other DNA
cgcagtcgtgtgtagcgttt

SEQ ID NO: 135 - DNA, 20 bp, synthetic construct
  misc_feature 1..20: note = Antisense Oligonucleotide
  source 1..20: mol_type = other DNA
acgtcttggtcttgccgatg

SEQ ID NO: 136 - DNA, 20 bp, synthetic construct
  misc_feature 1..20: note = Antisense Oligonucleotide
  source 1..20: mol_type = other DNA
cacgtcttggtcttgccgat

SEQ ID NO: 137 - DNA, 20 bp, synthetic construct
  misc_feature 1..20: note = Antisense Oligonucleotide
  source 1..20: mol_type = other DNA
atcttaatgggactcacggg

SEQ ID NO: 138 - DNA, 20 bp, synthetic construct
  misc_feature 1..20: note = Antisense Oligonucleotide
  source 1..20: mol_type = other DNA
ccatcttaatgggactcacg

SEQ ID NO: 139 - DNA, 20 bp, synthetic construct
  misc_feature 1..20: note = Antisense Oligonucleotide
  source 1..20: mol_type = other DNA
actccatcttaatgggactc

SEQ ID NO: 140 - DNA, 20 bp, synthetic construct
  misc_feature 1..20: note = Antisense Oligonucleotide
  source 1..20: mol_type = other DNA
tagtcaaacctgtcttggta

SEQ ID NO: 141 - DNA, 20 bp, synthetic construct
  misc_feature 1..20: note = Antisense Oligonucleotide
  source 1..20: mol_type = other DNA
gctcatgatcaggtccccca

SEQ ID NO: 142 - DNA, 20 bp, synthetic construct
  misc_feature 1..20: note = Antisense Oligonucleotide
  source 1..20: mol_type = other DNA
ggcagcagctcatgatcagg

SEQ ID NO: 143 - DNA, 20 bp, synthetic construct
  misc_feature 1..20: note = Antisense Oligonucleotide
  source 1..20: mol_type = other DNA
cgtcaaaggcaccttgcagc

SEQ ID NO: 144 - DNA, 20 bp, synthetic construct
  misc_feature 1..20: note = Antisense Oligonucleotide
  source 1..20: mol_type = other DNA
tgtgctcgtcaaaggcacct

SEQ ID NO: 145 - DNA, 20 bp, synthetic construct
  misc_feature 1..20: note = Antisense Oligonucleotide
  source 1..20: mol_type = other DNA
gtcctatgtgctcgtcaaag

SEQ ID NO: 146 - DNA, 20 bp, synthetic construct
  misc_feature 1..20: note = Antisense Oligonucleotide
  source 1..20: mol_type = other DNA
cggtcctatgtgctcgtcaa

SEQ ID NO: 147 - DNA, 20 bp, synthetic construct
  misc_feature 1..20: note = Antisense Oligonucleotide
  source 1..20: mol_type = other DNA
agcggtcctatgtgctcgtc

SEQ ID NO: 148 - DNA, 20 bp, synthetic construct
  misc_feature 1..20: note = Antisense Oligonucleotide
  source 1..20: mol_type = other DNA
gagcggtcctatgtgctcgt

SEQ ID NO: 149 - DNA, 20 bp, synthetic construct
  misc_feature 1..20: note = Antisense Oligonucleotide
  source 1..20: mol_type = other DNA
agagcggtcctatgtgctcg

SEQ ID NO: 150 - DNA, 20 bp, synthetic construct
  misc_feature 1..20: note = Antisense Oligonucleotide
  source 1..20: mol_type = other DNA
cagtgcagagcggtcctatg

SEQ ID NO: 151 - DNA, 20 bp, synthetic construct
  misc_feature 1..20: note = Antisense Oligonucleotide
  source 1..20: mol_type = other DNA
ccagtcagtgcagagcggtc

SEQ ID NO: 152 - DNA, 20 bp, synthetic construct
  misc_feature 1..20: note = Antisense Oligonucleotide
  source 1..20: mol_type = other DNA
tcggccttctgccagtcagt

SEQ ID NO: 153 - DNA, 20 bp, synthetic construct
  misc_feature 1..20: note = Antisense Oligonucleotide
  source 1..20: mol_type = other DNA
gaatgtctccccgctcggcc

SEQ ID NO: 154 - DNA, 20 bp, synthetic construct
  misc_feature 1..20: note = Antisense Oligonucleotide
  source 1..20: mol_type = other DNA
gagaatgtctccccgctcgg

SEQ ID NO: 155 - DNA, 20 bp, synthetic construct
  misc_feature 1..20: note = Antisense Oligonucleotide
  source 1..20: mol_type = other DNA
caggagaatgtctccccgct

SEQ ID NO: 156 - DNA, 20 bp, synthetic construct
  misc_feature 1..20: note = Antisense Oligonucleotide
  source 1..20: mol_type = other DNA
gatctccacatgccgaggat

SEQ ID NO: 157 - DNA, 20 bp, synthetic construct
  misc_feature 1..20: note = Antisense Oligonucleotide
  source 1..20: mol_type = other DNA
ttctcctgaatcagactgaa

SEQ ID NO: 158 - DNA, 20 bp, synthetic construct
  misc_feature 1..20: note = Antisense Oligonucleotide
  source 1..20: mol_type = other DNA
cagtccagtgcacacgatcc

SEQ ID NO: 159 - DNA, 20 bp, synthetic construct
  misc_feature 1..20: note = Antisense Oligonucleotide
  source 1..20: mol_type = other DNA
tacatggcggcaaagaactc

SEQ ID NO: 160 - DNA, 20 bp, synthetic construct
  misc_feature 1..20: note = Antisense Oligonucleotide
  source 1..20: mol_type = other DNA
cgaatttgccatagttttcc

SEQ ID NO: 161 - DNA, 20 bp, synthetic construct
  misc_feature 1..20: note = Antisense Oligonucleotide
  source 1..20: mol_type = other DNA
ccaaagaggaaacgtacaac

SEQ ID NO: 162 - DNA, 20 bp, synthetic construct
  misc_feature 1..20: note = Antisense Oligonucleotide
  source 1..20: mol_type = other DNA
gcctgatttgctgagagatc

SEQ ID NO: 163 - DNA, 20 bp, synthetic construct
  misc_feature 1..20: note = Antisense Oligonucleotide
  source 1..20: mol_type = other DNA
catctcgtacaaacagtaga

SEQ ID NO: 164 - DNA, 20 bp, synthetic construct
  misc_feature 1..20: note = Antisense Oligonucleotide
  source 1..20: mol_type = other DNA
gcatctcgtacaaacagtag

SEQ ID NO: 165 - DNA, 20 bp, synthetic construct
  misc_feature 1..20: note = Antisense Oligonucleotide
  source 1..20: mol_type = other DNA
atggccctttgcacgaagtc

SEQ ID NO: 166 - DNA, 20 bp, synthetic construct
  misc_feature 1..20: note = Antisense Oligonucleotide
  source 1..20: mol_type = other DNA
agtccatggccctttgcacg

SEQ ID NO: 167 - DNA, 20 bp, synthetic construct
  misc_feature 1..20: note = Antisense Oligonucleotide
  source 1..20: mol_type = other DNA
agagattgatctcaatcttg

SEQ ID NO: 168 - DNA, 20 bp, synthetic construct
  misc_feature 1..20: note = Antisense Oligonucleotide
  source 1..20: mol_type = other DNA
gatgacagttctcaatgcaa

SEQ ID NO: 169 - DNA, 20 bp, synthetic construct
  misc_feature 1..20: note = Antisense Oligonucleotide
  source 1..20: mol_type = other DNA
cacccgatgacagttctcaa

SEQ ID NO: 170 - DNA, 20 bp, synthetic construct
  misc_feature 1..20: note = Antisense Oligonucleotide
  source 1..20: mol_type = other DNA
gactccacccgatgacagtt

SEQ ID NO: 171 - DNA, 20 bp, synthetic construct
  misc_feature 1..20: note = Antisense Oligonucleotide
  source 1..20: mol_type = other DNA
aaggtgtcggccttcctttt

SEQ ID NO: 172 - DNA, 20 bp, synthetic construct
  misc_feature 1..20: note = Antisense Oligonucleotide
  source 1..20: mol_type = other DNA
catatcaaggtgtcggcctt

SEQ ID NO: 173 - DNA, 20 bp, synthetic construct
  misc_feature 1..20: note = Antisense Oligonucleotide
  source 1..20: mol_type = other DNA
cagcactcatgcgagaggcc

SEQ ID NO: 174 - DNA, 20 bp, synthetic construct
  misc_feature 1..20: note = Antisense Oligonucleotide
  source 1..20: mol_type = other DNA
gtcgaagcagcactcatgcg

SEQ ID NO: 175 - DNA, 20 bp, synthetic construct
  misc_feature 1..20: note = Antisense Oligonucleotide
  source 1..20: mol_type = other DNA
gaggaccaaggagatgtcga

SEQ ID NO: 176 - DNA, 20 bp, synthetic construct
  misc_feature 1..20: note = Antisense Oligonucleotide
  source 1..20: mol_type = other DNA
tggttgctgctgaggaccaa

SEQ ID NO: 177 - DNA, 20 bp, synthetic construct
  misc_feature 1..20: note = Antisense Oligonucleotide
  source 1..20: mol_type = other DNA
gattgcacaacaggtgcttc

SEQ ID NO: 178 - DNA, 20 bp, synthetic construct
  misc_feature 1..20: note = Antisense Oligonucleotide
  source 1..20: mol_type = other DNA
ggtgcgtgagattctgatta

SEQ ID NO: 179 - DNA, 20 bp, synthetic construct
  misc_feature 1..20: note = Antisense Oligonucleotide
  source 1..20: mol_type = other DNA
gtaaaggtgcgtgagattct

SEQ ID NO: 180 - DNA, 20 bp, synthetic construct
  misc_feature 1..20: note = Antisense Oligonucleotide
  source 1..20: mol_type = other DNA
ctcgcaggtaaaggtgcgtg

SEQ ID NO: 181 - DNA, 20 bp, synthetic construct
  misc_feature 1..20: note = Antisense Oligonucleotide
  source 1..20: mol_type = other DNA
cctcgcaggtaaaggtgcgt

SEQ ID NO: 182 - DNA, 20 bp, synthetic construct
  misc_feature 1..20: note = Antisense Oligonucleotide
  source 1..20: mol_type = other DNA
gttgcctcgcaggtaaaggt

SEQ ID NO: 183 - DNA, 20 bp, synthetic construct
  misc_feature 1..20: note = Antisense Oligonucleotide
  source 1..20: mol_type = other DNA
agagtgttgcctcgcaggta

SEQ ID NO: 184 - DNA, 20 bp, synthetic construct
  misc_feature 1..20: note = Antisense Oligonucleotide
  source 1..20: mol_type = other DNA
cgagagtgttgcctcgcagg

SEQ ID NO: 185 - DNA, 20 bp, synthetic construct
  misc_feature 1..20: note = Antisense Oligonucleotide
  source 1..20: mol_type = other DNA
tccgagagtgttgcctcgca

SEQ ID NO: 186 - DNA, 20 bp, synthetic construct
  misc_feature 1..20: note = Antisense Oligonucleotide
  source 1..20: mol_type = other DNA
ctccgagagtgttgcctcgc

SEQ ID NO: 187 - DNA, 20 bp, synthetic construct
  misc_feature 1..20: note = Antisense Oligonucleotide
  source 1..20: mol_type = other DNA
tctccgagagtgttgcctcg

SEQ ID NO: 188 - DNA, 20 bp, synthetic construct
  misc_feature 1..20: note = Antisense Oligonucleotide
  source 1..20: mol_type = other DNA
cttgtctccgagagtgttgc

SEQ ID NO: 189 - DNA, 20 bp, synthetic construct
  misc_feature 1..20: note = Antisense Oligonucleotide
  source 1..20: mol_type = other DNA
gatccccttgtctccgagag

SEQ ID NO: 190 - DNA, 20 bp, synthetic construct
  misc_feature 1..20: note = Antisense Oligonucleotide
  source 1..20: mol_type = other DNA
acctgaagcttgcagtcggg

SEQ ID NO: 191 - DNA, 20 bp, synthetic construct
  misc_feature 1..20: note = Antisense Oligonucleotide
  source 1..20: mol_type = other DNA
gcagttgtctaattccaaca

SEQ ID NO: 192 - DNA, 20 bp, synthetic construct
  misc_feature 1..20: note = Antisense Oligonucleotide
  source 1..20: mol_type = other DNA
aggttgcagttgtctaattc

SEQ ID NO: 193 - DNA, 20 bp, synthetic construct
  misc_feature 1..20: note = Antisense Oligonucleotide
  source 1..20: mol_type = other DNA
gtgacgtgaggttgcagttg

SEQ ID NO: 194 - DNA, 20 bp, synthetic construct
  misc_feature 1..20: note = Antisense Oligonucleotide
  source 1..20: mol_type = other DNA
gcagtgtgacgtgaggttgc

SEQ ID NO: 195 - DNA, 20 bp, synthetic construct
  misc_feature 1..20: note = Antisense Oligonucleotide
  source 1..20: mol_type = other DNA
gctcagctttcgcaggctct

SEQ ID NO: 196 - DNA, 20 bp, synthetic construct
  misc_feature 1..20: note = Antisense Oligonucleotide
  source 1..20: mol_type = other DNA
gtcgcccaggtcattgttgc

SEQ ID NO: 197 - DNA, 20 bp, synthetic construct
  misc_feature 1..20: note = Antisense Oligonucleotide
  source 1..20: mol_type = other DNA
atcatgacccccaggtcgcc

SEQ ID NO: 198 - DNA, 20 bp, synthetic construct
  misc_feature 1..20: note = Antisense Oligonucleotide
  source 1..20: mol_type = other DNA
acatcctctaactgaggcgc

SEQ ID NO: 199 - DNA, 20 bp, synthetic construct
  misc_feature 1..20: note = Antisense Oligonucleotide
  source 1..20: mol_type = other DNA
ccaagaggaacatcctctaa

SEQ ID NO: 200 - DNA, 20 bp, synthetic construct
  misc_feature 1..20: note = Antisense Oligonucleotide
  source 1..20: mol_type = other DNA
gttatggtcagttaatagaa

SEQ ID NO: 201 - DNA, 20 bp, synthetic construct
  misc_feature 1..20: note = Antisense Oligonucleotide
  source 1..20: mol_type = other DNA
caccagggaacatctcgggg

SEQ ID NO: 202 - DNA, 20 bp, synthetic construct
  misc_feature 1..20: note = Antisense Oligonucleotide
  source 1..20: mol_type = other DNA
accagggaacatctcgggga

SEQ ID NO: 203 - DNA, 20 bp, synthetic construct
  misc_feature 1..20: note = Antisense Oligonucleotide
  source 1..20: mol_type = other DNA
ccagggaacatctcggggag

SEQ ID NO: 204 - DNA, 20 bp, synthetic construct
  misc_feature 1..20: note = Antisense Oligonucleotide
  source 1..20: mol_type = other DNA
gggaacatctcggggagcct

SEQ ID NO: 205 - DNA, 20 bp, synthetic construct
  misc_feature 1..20: note = Antisense Oligonucleotide
  source 1..20: mol_type = other DNA
ggaacatctcggggagcctg

SEQ ID NO: 206 - DNA, 20 bp, synthetic construct
  misc_feature 1..20: note = Antisense Oligonucleotide
  source 1..20: mol_type = other DNA
gagcctggttggaagctgca

SEQ ID NO: 207 - DNA, 17 bp, synthetic construct
  misc_feature 1..17: note = Antisense Oligonucleotide
  source 1..17: mol_type = other DNA
gcaggcttagtctgtcg

SEQ ID NO: 208 - DNA, 15 bp, synthetic construct
  misc_feature 1..15: note = Antisense Oligonucleotide
  source 1..15: mol_type = other DNA
aggcttagtctgtcg

SEQ ID NO: 209 - DNA, 17 bp, synthetic construct
  misc_feature 1..17: note = Antisense Oligonucleotide
  source 1..17: mol_type = other DNA
ttagtctgtcggctgcg

SEQ ID NO: 210 - DNA, 20 bp, synthetic construct
  misc_feature 1..20: note = Antisense Oligonucleotide
  source 1..20: mol_type = other DNA
gcttggaagaaggggttacg

SEQ ID NO: 211 - DNA, 20 bp, synthetic construct
  misc_feature 1..20: note = Antisense Oligonucleotide
  source 1..20: mol_type = other DNA
gaagaaggggttacgctgtt

SEQ ID NO: 212 - DNA, 20 bp, synthetic construct
  misc_feature 1..20: note = Antisense Oligonucleotide
  source 1..20: mol_type = other DNA
aagaaggggttacgctgttt

SEQ ID NO: 213 - DNA, 20 bp, synthetic construct
  misc_feature 1..20: note = Antisense Oligonucleotide
  source 1..20: mol_type = other DNA
agaaggggttacgctgtttg

SEQ ID NO: 214 - DNA, 20 bp, synthetic construct
  misc_feature 1..20: note = Antisense Oligonucleotide
  source 1..20: mol_type = other DNA
gaaggggttacgctgtttgg

SEQ ID NO: 215 - DNA, 20 bp, synthetic construct
  misc_feature 1..20: note = Antisense Oligonucleotide
  source 1..20: mol_type = other DNA
aaggggttacgctgtttggc

SEQ ID NO: 216 - DNA, 15 bp, synthetic construct
  misc_feature 1..15: note = Antisense Oligonucleotide
  source 1..15: mol_type = other DNA
aggggttacgctgtt

SEQ ID NO: 217 - DNA, 15 bp, synthetic construct
  misc_feature 1..15: note = Antisense Oligonucleotide
  source 1..15: mol_type = other DNA
ggttacgctgtttgg

SEQ ID NO: 218 - DNA, 17 bp, synthetic construct
  misc_feature 1..17: note = Antisense Oligonucleotide
  source 1..17: mol_type = other DNA
gttacgctgtttggccg

SEQ ID NO: 219 - DNA, 15 bp, synthetic construct
  misc_feature 1..15: note = Antisense Oligonucleotide
  source 1..15: mol_type = other DNA
gttacgctgtttggc

SEQ ID NO: 220 - DNA, 17 bp, synthetic construct
  misc_feature 1..17: note = Antisense Oligonucleotide
  source 1..17: mol_type = other DNA
ttacgctgtttggccgg

SEQ ID NO: 221 - DNA, 20 bp, synthetic construct
  misc_feature 1..20: note = Antisense Oligonucleotide
  source 1..20: mol_type = other DNA
tacgctgtttggccgggcag

SEQ ID NO: 222 - DNA, 20 bp, synthetic construct
  misc_feature 1..20: note = Antisense Oligonucleotide
  source 1..20: mol_type = other DNA
acgctgtttggccgggcaga

SEQ ID NO: 223 - DNA, 20 bp, synthetic construct
  misc_feature 1..20: note = Antisense Oligonucleotide
  source 1..20: mol_type = other DNA
cgctgtttggccgggcagaa

SEQ ID NO: 224 - DNA, 20 bp, synthetic construct
  misc_feature 1..20: note = Antisense Oligonucleotide
  source 1..20: mol_type = other DNA
gctgtttggccgggcagaaa

SEQ ID NO: 225 - DNA, 20 bp, synthetic construct
  misc_feature 1..20: note = Antisense Oligonucleotide
  source 1..20: mol_type = other DNA
ctgtttggccgggcagaaac

SEQ ID NO: 226 - DNA, 20 bp, synthetic construct
  misc_feature 1..20: note = Antisense Oligonucleotide
  source 1..20: mol_type = other DNA
tgtttggccgggcagaaact

SEQ ID NO: 227 - DNA, 20 bp, synthetic construct
  misc_feature 1..20: note = Antisense Oligonucleotide
  source 1..20: mol_type = other DNA
gtttggccgggcagaaactc

SEQ ID NO: 228 - DNA, 20 bp, synthetic construct
  misc_feature 1..20: note = Antisense Oligonucleotide
  source 1..20: mol_type = other DNA
ttggccgggcagaaactccg

SEQ ID NO: 229 - DNA, 20 bp, synthetic construct
  misc_feature 1..20: note = Antisense Oligonucleotide
  source 1..20: mol_type = other DNA
tggccgggcagaaactccgc

SEQ ID NO: 230 - DNA, 20 bp, synthetic construct
  misc_feature 1..20: note = Antisense Oligonucleotide
  source 1..20: mol_type = other DNA
ggccgggcagaaactccgct

SEQ ID NO: 231 - DNA, 20 bp, synthetic construct
  misc_feature 1..20: note = Antisense Oligonucleotide
  source 1..20: mol_type = other DNA
gccgggcagaaactccgctg

SEQ ID NO: 232 - DNA, 20 bp, synthetic construct
  misc_feature 1..20: note = Antisense Oligonucleotide
  source 1..20: mol_type = other DNA
ccgggcagaaactccgctga

SEQ ID NO: 233 - DNA, 20 bp, synthetic construct
  misc_feature 1..20: note = Antisense Oligonucleotide
  source 1..20: mol_type = other DNA
cgggcagaaactccgctgag

SEQ ID NO: 234 - DNA, 20 bp, synthetic construct
  misc_feature 1..20: note = Antisense Oligonucleotide
  source 1..20: mol_type = other DNA
gggcagaaactccgctgagc

SEQ ID NO: 235 - DNA, 20 bp, synthetic construct
  misc_feature 1..20: note = Antisense Oligonucleotide
  source 1..20: mol_type = other DNA
ggcagaaactccgctgagca

SEQ ID NO: 236 - DNA, 20 bp, synthetic construct
  misc_feature 1..20: note = Antisense Oligonucleotide
  source 1..20: mol_type = other DNA
ccccgagatgttccctggtg

SEQ ID NO: 237 - DNA, 20 bp, synthetic construct
  misc_feature 1..20: note = Antisense Oligonucleotide
  source 1..20: mol_type = other DNA
tccccgagatgttccctggt

SEQ ID NO: 238 - DNA, 20 bp, synthetic construct
  misc_feature 1..20: note = Antisense Oligonucleotide
  source 1..20: mol_type = other DNA
ctccccgagatgttccctgg

SEQ ID NO: 239 - DNA, 20 bp, synthetic construct
  misc_feature 1..20: note = Antisense Oligonucleotide
  source 1..20: mol_type = other DNA
aggctccccgagatgttccc

SEQ ID NO: 240 - DNA, 20 bp, synthetic construct
  misc_feature 1..20: note = Antisense Oligonucleotide
  source 1..20: mol_type = other DNA
caggctccccgagatgttcc

SEQ ID NO: 241 - DNA, 20 bp, synthetic construct
  misc_feature 1..20: note = Antisense Oligonucleotide
  source 1..20: mol_type = other DNA
tgcagcttccaaccaggctc

SEQ ID NO: 242 - DNA, 17 bp, synthetic construct
  misc_feature 1..17: note = Antisense Oligonucleotide
  source 1..17: mol_type = other DNA
cgacagactaagcctgc

SEQ ID NO: 243 - DNA, 15 bp, synthetic construct
  misc_feature 1..15: note = Antisense Oligonucleotide
  source 1..15: mol_type = other DNA
cgacagactaagcct

SEQ ID NO: 244 - DNA, 17 bp, synthetic construct
  misc_feature 1..17: note = Antisense Oligonucleotide
  source 1..17: mol_type = other DNA
cgcagccgacagactaa

SEQ ID NO: 245 - DNA, 20 bp, synthetic construct
  misc_feature 1..20: note = Antisense Oligonucleotide
  source 1..20: mol_type = other DNA
cgtaaccccttcttccaagc

SEQ ID NO: 246 - DNA, 20 bp, synthetic construct
  misc_feature 1..20: note = Antisense Oligonucleotide
  source 1..20: mol_type = other DNA
aacagcgtaaccccttcttc

SEQ ID NO: 247 - DNA, 20 bp, synthetic construct
  misc_feature 1..20: note = Antisense Oligonucleotide
  source 1..20: mol_type = other DNA
aaacagcgtaaccccttctt

SEQ ID NO: 248 - DNA, 20 bp, synthetic construct
  misc_feature 1..20: note = Antisense Oligonucleotide
  source 1..20: mol_type = other DNA
caaacagcgtaaccccttct

SEQ ID NO: 249 - DNA, 20 bp, synthetic construct
  misc_feature 1..20: note = Antisense Oligonucleotide
  source 1..20: mol_type = other DNA
ccaaacagcgtaaccccttc

SEQ ID NO: 250 - DNA, 20 bp, synthetic construct
  misc_feature 1..20: note = Antisense Oligonucleotide
  source 1..20: mol_type = other DNA
gccaaacagcgtaacccctt

SEQ ID NO: 251 - DNA, 15 bp, synthetic construct
  misc_feature 1..15: note = Antisense Oligonucleotide
  source 1..15: mol_type = other DNA
aacagcgtaacccct

SEQ ID NO: 252 - DNA, 15 bp, synthetic construct
  misc_feature 1..15: note = Antisense Oligonucleotide
  source 1..15: mol_type = other DNA
ccaaacagcgtaacc

SEQ ID NO: 253 - DNA, 17 bp, synthetic construct
  misc_feature 1..17: note = Antisense Oligonucleotide
  source 1..17: mol_type = other DNA
cggccaaacagcgtaac

SEQ ID NO: 254 - DNA, 15 bp, synthetic construct
  misc_feature 1..15: note = Antisense Oligonucleotide
  source 1..15: mol_type = other DNA
gccaaacagcgtaac

SEQ ID NO: 255 - DNA, 17 bp, synthetic construct
  misc_feature 1..17: note = Antisense Oligonucleotide
  source 1..17: mol_type = other DNA
ccggccaaacagcgtaa

SEQ ID NO: 256 - DNA, 20 bp, synthetic construct
  misc_feature 1..20: note = Antisense Oligonucleotide
  source 1..20: mol_type = other DNA
ctgcccggccaaacagcgta

SEQ ID NO: 257 - DNA, 20 bp, synthetic construct
  misc_feature 1..20: note = Antisense Oligonucleotide
  source 1..20: mol_type = other DNA
tctgcccggccaaacagcgt

SEQ ID NO: 258 - DNA, 20 bp, synthetic construct
  misc_feature 1..20: note = Antisense Oligonucleotide
  source 1..20: mol_type = other DNA
ttctgcccggccaaacagcg

SEQ ID NO: 259 - DNA, 20 bp, synthetic construct
  misc_feature 1..20: note = Antisense Oligonucleotide
  source 1..20: mol_type = other DNA
tttctgcccggccaaacagc

SEQ ID NO: 260 - DNA, 20 bp, synthetic construct
  misc_feature 1..20: note = Antisense Oligonucleotide
  source 1..20: mol_type = other DNA
gtttctgcccggccaaacag

SEQ ID NO: 261 - DNA, 20 bp, synthetic construct
  misc_feature 1..20: note = Antisense Oligonucleotide
  source 1..20: mol_type = other DNA
agtttctgcccggccaaaca

SEQ ID NO: 262 - DNA, 20 bp, synthetic construct
  misc_feature 1..20: note = Antisense Oligonucleotide
  source 1..20: mol_type = other DNA
gagtttctgcccggccaaac

SEQ ID NO: 263 - DNA, 20 bp, synthetic construct
  misc_feature 1..20: note = Antisense Oligonucleotide
  source 1..20: mol_type = other DNA
cggagtttctgcccggccaa

SEQ ID NO: 264 - DNA, 20 bp, synthetic construct
  misc_feature 1..20: note = Antisense Oligonucleotide
  source 1..20: mol_type = other DNA
gcggagtttctgcccggcca

SEQ ID NO: 265 - DNA, 20 bp, synthetic construct
  misc_feature 1..20: note = Antisense Oligonucleotide
  source 1..20: mol_type = other DNA
agcggagtttctgcccggcc

SEQ ID NO: 266 - DNA, 20 bp, synthetic construct
  misc_feature 1..20: note = Antisense Oligonucleotide
  source 1..20: mol_type = other DNA
cagcggagtttctgcccggc

SEQ ID NO: 267 - DNA, 20 bp, synthetic construct
  misc_feature 1..20: note = Antisense Oligonucleotide
  source 1..20: mol_type = other DNA
tcagcggagtttctgcccgg

SEQ ID NO: 268 - DNA, 20 bp, synthetic construct
  misc_feature 1..20: note = Antisense Oligonucleotide
  source 1..20: mol_type = other DNA
ctcagcggagtttctgcccg

SEQ ID NO: 269 - DNA, 20 bp, synthetic construct
  misc_feature 1..20: note = Antisense Oligonucleotide
  source 1..20: mol_type = other DNA
gctcagcggagtttctgccc

SEQ ID NO: 270 - DNA, 20 bp, synthetic construct
  misc_feature 1..20: note = Antisense Oligonucleotide
  source 1..20: mol_type = other DNA
tgctcagcggagtttctgcc

SEQ ID NO: 271-300 - skipped (30 entries)

SEQ ID NO: 301 - protein, 879 aa, synthetic construct
  REGION 1..879: note = PrX - PTGFRN
MGRLASRPLLLALLSLALCRGRVVRVPTATLVRVVGTELVIPCNVSDYDGPSEQNFDWSFSSLGSSFVELASTWEVGFPAQLYQERLQRGEILLRRTANDAVELHIKNVQPSDQGHYKCSTPSTDATVQGNYEDTVQVKVLADSLHVGPSARPPPSLSLREGEPFELRCTAASASPLHTHLALLWEVHRGPARRSVLALTHEGRFHPGLGYEQRYHSGDVRLDTVGSDAYRLSVSRALSADQGSYRCIVSEWIAEQGNWQEIQEKAVEVATVVIQPSVLRAAVPKNVSVAEGKELDLTCNITTDRADDVRPEVTWSFSRMPDSTLPGSRVLARLDRDSLVHSSPHVALSHVDARSYHLLVRDVSKENSGYYYCHVSLWAPGHNRSWHKVAEAVSSPAGVGVTWLEPDYQVYLNASKVPGFADDPTELACRVVDTKSGEANVRFTVSWYYRMNRRSDNVVTSELLAVMDGDWTLKYGERSKQRAQDGDFIFSKEHTDTFNFRIQRTTEEDRGNYYCVVSAWTKQRNNSWVKSKDVFSKPVNIFWALEDSVLVVKARQPKPFFAAGNTFEMTCKVSSKNIKSPRYSVLIMAEKPVGDLSSPNETKYIISLDQDSVVKLENWTDASRVDGVVLEKVQEDEFRYRMYQTQVSDAGLYRCMVTAWSPVRGSLWREAATSLSNPIEIDFQTSGPIFNASVHSDTPSVIRGDLIKLFCIITVEGAALDPDDMAFDVSWFAVHSFGLDKAPVLLSSLDRKGIVTTSRRDWKSDLSLERVSVLEFLLQVHGSEDQDFGNYYCSVTPWVKSPTGSWQKEAEIHSKPVFITVKMDVLNAFKYPLLIGVGLSTVIGLLSCLIGYCSSHWCCKKEVQETRRERRRLMSMEMD

SEQ ID NO: 302 - protein, 192 aa, synthetic construct
  REGION 1..192: note = PrX - PTGFRN fragment
GPIFNASVHSDTPSVIRGDLIKLFCIITVEGAALDPDDMAFDVSWFAVHSFGLDKAPVLLSSLDRKGIVTTSRRDWKSDLSLERVSVLEFLLQVHGSEDQDFGNYYCSVTPWVKSPTGSWQKEAEIHSKPVFITVKMDVLNAFKYPLLIGVGLSTVIGLLSCLIGYCSSHWCCKKEVQETRRERRRLMSMEM

SEQ ID NO: 303 - protein, 385 aa, synthetic construct
  REGION 1..385: note = BSG Protein
MAAALFVLLGFALLGTHGASGAAGFVQAPLSQQRWVGGSVELHCEAVGSPVPEIQWWFEGQGPNDTCSQLWDGARLDRVHIHATYHQHAASTISIDTLVEEDTGTYECRASNDPDRNHLTRAPRVKWVRAQAVVLVLEPGTVFTTVEDLGSKILLTCSLNDSATEVTGHRWLKGGVVLKEDALPGQKTEFKVDSDDQWGEYSCVFLPEPMGTANIQLHGPPRVKAVKSSEHINEGETAMLVCKSESVPPVTDWAWYKITDSEDKALMNGSESRFFVSSSQGRSELHIENLNMEADPGQYRCNGTSSKGSDQAIITLRVRSHLAALWPFLGIVAEVLVLVTIIFIYEKRRKPEDVLDDDDAGSAPLKSSGQHQNDKGKNVRQRNSS

SEQ ID NO: 304 - protein, 613 aa, synthetic construct
  REGION 1..613: note = The IGSF8 protein
MGALRPTLLPPSLPLLLLLMLGMGCWAREVLVPEGPLYRVAGTAVSISCNVTGYEGPAQQNFEWFLYRPEAPDTALGIVSTKDTQFSYAVFKSRVVAGEVQVQRLQGDAVVLKIARLQAQDAGIYECHTPSTDTRYLGSYSGKVELRVLPDVLQVSAAPPGPRGRQAPTSPPRMTVHEGQELALGCLARTSTQKHTHLAVSFGRSVPEAPVGRSTLQEVVGIRSDLAVEAGAPYAERLAAGELRLGKEGTDRYRMVVGGAQAGDAGTYHCTAAEWIQDPDGSWAQIAEKRAVLAHVDVQTLSSQLAVTVGPGERRIGPGEPLELLCNVSGALPPAGRHAAYSVGWEMAPAGAPGPGRLVAQLDTEGVGSLGPGYEGRHIAMEKVASRTYRLRLEAARPGDAGTYRCLAKAYVRGSGTRLREAASARSRPLPVHVREEGVVLEAVAWLAGGTVYRGETASLLCNISVRGGPPGLRLAASWWVERPEDGELSSVPAQLVGGVGQDGVAELGVRPGGGPVSVELVGPRSHRLRLHSLGPEDEGVYHCAPSAWVQHADYSWYQAGSARSGPVTVYPYMHALDTLFVPLLVGTGVALVTGATVLGTITCCFMKRLRKR

SEQ ID NO: 305 - protein, 748 aa, synthetic construct
  REGION 1..748: note = The ITGB1 protein
MNLQPIFWIGLISSVCCVFAQTDENRCLKANAKSCGECIQAGPNCGWCTNSTFLQEGMPTSARCDDLEALKKKGCPPDDIENPRGSKDIKKNKNVTNRSKGTAEKLKPEDITQIQPQQLVLRLRSGEPQTFTLKFKRAEDYPIDLYYLMDLSYSMKDDLENVKSLGTDLMNEMRRITSDFRIGFGSFVEKTVMPYISTTPAKLRNPCTSEQNCTSPFSYKNVLSLTNKGEVFNELVGKQRISGNLDSPEGGFDAIMQVAVCGSLIGWRNVTRLLVFSTDAGFHFAGDGKLGGIVLPNDGQCHLENNMYTMSHYYDYPSIAHLVQKLSENNIQTIFAVTEEFQPVYKELKNLIPKSAVGTLSANSSNVIQLIIDAYNSLSSEVILENGKLSEGVTISYKSYCKNGVNGTGENGRKCSNISIGDEVQFEISITSNKCPKKDSDSFKIRPLGFTEEVEVILQYICECECQSEGIPESPKCHEGNGTFECGACRCNEGRVGRHCECSTDEVNSEDMDAYCRKENSSEICSNNGECVCGQCVCRKRDNTNEIYSGASNGQICNGRGICECGVCKCTDPKFQGQTCEMCQTCLGVCAEHKECVQCRAFNKGEKKDTCTQECSYFNITKVESRDKLPQPVQPDPVSHCKEKDVDDCWFYFTYSVNGNNEVMVHVVENPECPTGPDIIPIVAGVVAGIVLIGLALLLIWKLLMIIHDRREFAKFEKEKMNAKWDTGENPIYKSAVTTVVNPKYEGK

SEQ ID NO: 306 - protein, 1032 aa, synthetic construct [sequence omitted]

SEQ ID NO: 307 - protein, 630 aa, synthetic construct
  REGION 1..630: note = The SLC3A2 Protein
MELQPPEASIAVVSIPRQLPGSHSEAGVQGLSAGDDSELGSHCVAQTGLELLASGDPLPSASQNAEMIETGSDCVTQAGLQLLASSDPPALASKNAEVTGTMSQDTEVDMKEVELNELEPEKQPMNAASGAAMSLAGAEKNGLVKIKVAEDEAEAAAAAKFTGLSKEELLKVAGSPGWVRTRWALLLLFWLGWLGMLAGAVVIIVRAPRCRELPAQKWWHTGALYRIGDLQAFQGHGAGNLAGLKGRLDYLSSLKVKGLVLGPIHKNQKDDVAQTDLLQIDPNFGSKEDFDSLLQSAKKKSIRVILDLTPNYRGENSWFSTQVDTVATKVKDALEFWLQAGVDGFQVRDIENLKDASSFLAEWQNITKGFSEDRLLIAGTNSSDLQQILSLLESNKDLLLTSSYLSDSGSTGEHTKSLVTQYLNATGNRWCSWSLSQARLLTSFLPAQLLRLYQLMLFTLPGTPVFSYGDEIGLDAAALPGQPMEAPVMLWDESSFPDIPGAVSANMTVKGQSEDPGSLLSLFRRLSDQRSKERSLLHGDFHAFSAGPGLFSYIRHWDQNERFLVVLNFGDVGLSAGLQASDLPASASLPAKADLLLSTQPGREEGSPLELERLKLEPHEGLLLRFPYAA

SEQ ID NO: 308 - protein, 1021 aa, synthetic construct
  REGION 1..1021: note = IGSF2
MAGISYVASFFLLLTKLSIGQREVTVQKGPLFRAEGYPVSIGCNVTGHQGPSEQHFQWSVYLPTNPTQEVQIISTKDAAFSYAVYTQRVRSGDVYVERVQGNSVLLHISKLQMKDAGEYECHTPNTDEKYYGSYSAKTNLIVIPDTLSATMSSQTLGKEEGEPLALTCEASKATAQHTHLSVTWYLTQDGGGSQATEIISLSKDFILVPGPLYTERFAASDVQLNKLGPTTFRLSIERLQSSDQGQLFCEATEWIQDPDETWMFITKKQTDQTTLRIQPAVKDFQVNITADSLFAEGKPLELVCLVVSSGRDPQLQGIWFFNGTEIAHIDAGGVLGLKNDYKERASQGELQVSKLGPKAFSLKIFSLGPEDEGAYRCVVAEVMKTRTGSWQVLQRKQSPDSHVHLRKPAARSVVMSTKNKQQVVWEGETLAFLCKAGGAESPLSVSWWHIPRDQTQPEFVAGMGQDGIVQLGASYGVPSYHGNTRLEKMDWATFQLEITFTAITDSGTYECRVSEKSRNQARDLSWTQKISVTVKSLESSLQVSLMSRQPQVMLTNTFDLSCVVRAGYSDLKVPLTVTWQFQPASSHIFHQLIRITHNGTIEWGNFLSRFQKKTKVSQSLFRSQLLVHDATEEETGVYQCEVEVYDRNSLYNNRPPRASAISHPLRIAVTLPESKLKVNSRSQVQELSINSNTDIECSILSRSNGNLQLAIIWYFSPVSTNASWLKILEMDQTNVIKTGDEFHTPQRKQKFHTEKVSQDLFQLHILNVEDSDRGKYHCAVEEWLLSTNGTWHKLGEKKSGLTELKLKPTGSKVRVSKVYWTENVTEHREVAIRCSLESVGSSATLYSVMWYWNRENSGSKLLVHLQHDGLLEYGEEGLRRHLHCYRSSSTDFVLKLHQVEMEDAGMYWCRVAEWQLHGHPSKWINQASDESQRMVLTVLPSEPTLPSRICSSAPLLYFLFICPFVLLLLLLISLLCLYWKARKLSTLRSNTRKEKALWVDLKEAGGVTTNRREDEEEDEGN

SEQ ID NO: 309 - protein, 1195 aa, synthetic construct
  REGION 1..1195: note = IGSF3
MKCFFPVLSCLAVLGVVSAQRQVTVQEGPLYRTEGSHITIWCNVSGYQGPSEQNFQWSIYLPSSPEREVQIVSTMDSSFPYAIYTQRVRGGKIFIERVQGNSTLLHITDLQARDAGEYECHTPSTDKQYFGSYSAKMNLVVIPDSLQTTAMPQTLHRVEQDPLELTCEVASETIQHSHLSVAWLRQKVGEKPVEVISLSRDFMLHSSSEYAQRQSLGEVRLDKLGRTTFRLTIFHLQPSDQGEFYCEAAEWIQDPDGSWYAMTRKRSEGAVVNVQPTDKEFTVRLETEKRLHTVGEPVEFRCILEAQNVPDRYFAVSWAFNSSLIATMGPNAVPVLNSEFAHREARGQLKVAKESDSVFVLKIYHLRQEDSGKYNCRVTEREKTVTGEFIDKESKRPKNIPIIVLPLKSSISVEVASNASVILEGEDLRFSCSVRTAGRPQGRFSVIWQLVDRQNRRSNIMWLDRDGTVQPGSSYWERSSFGGVQMEQVQPNSFSLGIFNSRKEDEGQYECHVTEWVRAVDGEWQIVGERRASTPISITALEMGFAVTAISRTPGVTYSDSFDLQCIIKPHYPAWVPVSVTWRFQPVGTVEFHDLVTFTRDGGVQWGDRSSSFRTRTAIEKAESSNNVRLSISRASDTEAGKYQCVAELWRKNYNNTWTRLAERTSNLLEIRVLQPVTKLQVSKSKRTLTLVENKPIQLNCSVKSQTSQNSHFAVLWYVHKPSDADGKLILKTTHNSAFEYGTYAEEEGLRARLQFERHVSGGLFSLTVQRAEVSDSGSYYCHVEEWLLSPNYAWYKLAEEVSGRTEVTVKQPDSRLRLSQAQGNLSVLETRQVQLECVVLNRTSITSQLMVEWFVWKPNHPERETVARLSRDATFHYGEQAAKNNLKGRLHLESPSPGVYRLFIQNVAVQDSGTYSCHVEEWLPSPSGMWYKRAEDTAGQTALTVMRPDASLQVDTVVPNATVSEKAAFQLDCSIVSRSSQDSRFAVAWYSLRTKAGGKRSSPGLEEQEEEREEEEEEEEDDDDDDPTERTALLSVGPDAVFGPEGSPWEGRLRFQRLSPVLYRLTVLQASPQDTGNYSCHVEEWLPSPQKEWYRLTEEESAPIGIRVLDTSPTLQSIICSNDALFYFVFFYPFPIFGILIITILLVRFKSRNSSKNSDGKNGVPLLWIKEPHLNYSPTCLEPPVLSIHPGAID

SEQ ID NO: 310 - protein, 1023 aa, synthetic construct
  REGION 1..1023: note = ATP1A1
MGKGVGRDKYEPAAVSEQGDKKGKKGKKDRDMDELKKEVSMDDHKLSLDELHRKYGTDLSRGLTSARAAEILARDGPNALTPPPTTPEWIKFCRQLFGGFSMLLWIGAILCFLAYSIQAATEEEPQNDNLYLGVVLSAVVIITGCFSYYQEAKSSKIMESFKNMVPQQALVIRNGEKMSINAEEVVVGDLVEVKGGDRIPADLRIISANGCKVDNSSLTGESEPQTRSPDFTNENPLETRNIAFFSTNCVEGTARGIVVYTGDRTVMGRIATLASGLEGGQTPIAAEIEHFIHIITGVAVFLGVSFFILSLILEYTWLEAVIFLIGIIVANVPEGLLATVTVCLTLTAKRMARKNCLVKNLEAVETLGSTSTICSDKTGTLTQNRMTVAHMWFDNQIHEADTTENQSGVSFDKTSATWLALSRIAGLCNRAVFQANQENLPILKRAVAGDASESALLKCIELCCGSVKEMRERYAKIVEIPFNSTNKYQLSIHKNPNTSEPQHLLVMKGAPERILDRCSSILLHGKEQPLDEELKDAFQNAYLELGGLGERVLGFCHLFLPDEQFPEGFQFDTDDVNFPIDNLCFVGLISMIDPPRAAVPDAVGKCRSAGIKVIMVTGDHPITAKAIAKGVGIISEGNETVEDIAARLNIPVSQVNPRDAKACVVHGSDLKDMTSEQLDDILKYHTEIVFARTSPQQKLIIVEGCQRQGAIVAVTGDGVNDSPALKKADIGVAMGIAGSDVSKQAADMILLDDNFASIVTGVEEGRLIFDNLKKSIAYTLTSNIPEITPFLIFIIANIPLPLGTVTILCIDLGTDMVPAISLAYEQAESDIMKRQPRNPKTDKLVNERLISMAYGQIGMIQALGGFFTYFVILAENGFLPIHLLGLRVDWDDRWINDVEDSYGQQWTYEQRKIVEFTCHTAFFVSIVVVQWADLVICKTRRNSVFQQGMKNKILIFGLFEETALAAFLSYCPGMGVALRMYPLKPTWWFCAFPYSLLIFVYDEVRKLIIRRRPGGWVEKETYY

SEQ ID NO: 311 - protein, 240 aa, synthetic construct
  REGION 1..240: note = ATP1A2
MGRGAGREYSPAATTAENGGGKKKQKEKELDELKKEVAMDDHKLSLDELGRKYQVDLSKGLTNQRAQDVLARDGPNALTPPPTTPEWVKFCRQLFGGFSILLWIGAILCFLAYGIQAAMEDEPSNDNLYLGVVLAAVVIVTGCFSYYQEAKSSKIMDSFKNMVPQQALVIREGEKMQINAEEVVVGDLVEVKGGDRVPADLRIISSHGCKVDNSSLTGESEPQTRSPEFTHENPLETRNI

SEQ ID NO: 312 - protein, 780 aa, synthetic construct
  REGION 1..780: note = ATP1A3
CFFSTNCVEGTARGIVIATGDRTVMGRIATLASGLEVGRTPIAMEIEHFIQLITGVAVFLGVSFFVLSLILGYSWLEAVIFLIGIIVANVPEGLLATVTVCLTLTAKRMARKNCLVKNLEAVETLGSTSTICSDKTGTLTQNRMTVAHMWFDNQIHEADTTEDQSGATFDKRSPTWTALSRIAGLCNRAVFKAGQENISVSKRDTAGDASESALLKCIELSCGSVRKMRDRNPKVAEIPFNSTNKYQLSIHEREDSPQSHVLVMKGAPERILDRCSTILVQGKEIPLDKEMQDAFQNAYMELGGLGERVLGFCQLNLPSGKFPRGFKFDTDELNFPTEKLCFVGLMSMIDPPRAAVPDAVGKCRSAGIKVIMVTGDHPITAKAIAKGVGIISEGNETVEDIAARLNIPMSQVNPREAKACVVHGSDLKDMTSEQLDEILKNHTEIVFARTSPQQKLIIVEGCQRQGAIVAVTGDGVNDSPALKKADIGIAMGISGSDVSKQAADMILLDDNFASIVTGVEEGRLIFDNLKKSIAYTLTSNIPEITPFLLFIIANIPLPLGTVTILCIDLGTDMVPAISLAYEAAESDIMKRQPRNSQTDKLVNERLISMAYGQIGMIQALGGFFTYFVILAENGFLPSRLLGIRLDWDDRTMNDLEDSYGQEWTYEQRKVVEFTCHTAFFASIVVVQWADLIICKTRRNSVFQQGMKNKILIFGLLEETALAAFLSYCPGMGVALRMYPLKVTWWFCAFPYSLLIFIYDEVRKLILRRYPGGWVEKETYY

SEQ ID NO: 313 - protein, 1026 aa, synthetic construct
  REGION 1..1026: note = ATP1A4
MGSGGSDSYRIATSQDKKDDKDSPKKNKGKERRDLDDLKKEVAMTEHKMSVEEVCRKYNTDCVQGLTHSKAQEILARDGPNALTPPPTTPEWVKFCRQLFGGFSILLWIGAILCFLAYGIQAGTEDDPSGDNLYLGIVLAAVVIITGCFSYYQEAKSSKIMESFKNMVPQQALVIREGEKMQVNAEEVVVGDLVEIKGGDRVPADLRIISAHGCKVDNSSLTGESEPQTRSPDCTHDNPLETRNITFFSTNCVEGTARGVVVATGDRTVMGRIATLASGLEVGKTPIAIEIEHFIQLITGVAVFLGVSFFILSLILGYTWLEAVIFLIGIIVANVPEGLLATVTVCLTLTAKRMARKNCLVKNLEAVETLGSTSTICSDKTGTLTQNRMTVAHMWFDNQIHEADTTEDQSGTSFDKSSHTWVALSHIAGLCNRAVFKGGQDNIPVLKRDVAGDASESALLKCIELSSGSVKLMRERNKKVAEIPFNSTNKYQLSIHETEDPNDNRYLLVMKGAPERILDRCSTILLQGKEQPLDEEMKEAFQNAYLELGGLGERVLGFCHYYLPEEQFPKGFAFDCDDVNFTTDNLCFVGLMSMIDPPRAAVPDAVGKCRSAGIKVIMVTGDHPITAKAIAKGVGIISEGNETVEDIAARLNIPVSQVNPRDAKACVIHGTDLKDFTSEQIDEILQNHTEIVFARTSPQQKLIIVEGCQRQGAIVAVTGDGVNDSPALKKADIGVAMGIAGSDVSKQAADMILLDDNFASIVTGVEEGRLIFDNLKKSIAYTLTSNIPEITPFLLFIMANIPLPLGTITILCIDLGTDMVPAISLAYEAAESDIMKRQPRNPRTDKLVNERLISMAYGQIGMIQALGGFFSYFVILAENGFLPGNLVGIRLNWDDRTVNDLEDSYGQQWTYEQRKVVEFTCHTAFFVSIVVVQWADLIICKTRRNSVFQQGMKNKILIFGLFEETALAAFLSYCPGMDVALRMYPLKPSWWFCAFPYSFLIFVYDEIRKLILRRNPGGWVEKETYY

SEQ ID NO: 314 - protein, 1029 aa, synthetic construct
  REGION 1..1029: note = ATP1B3
MGLWGKKGTVAPHDQSPRRRPKKGLIKKKMVKREKQKRNMEELKKEVVMDDHKLTLEELSTKYSVDLTKGHSHQRAKEILTRGGPNTVTPPPTTPEWVKFCKQLFGGFSLLLWTGAILCFVAYSIQIYFNEEPTKDNLYLSIVLSVVVIVTGCFSYYQEAKSSKIMESFKNMVPQQALVIRGGEKMQINVQEVVLGDLVEIKGGDRVPADLRLISAQGCKVDNSSLTGESEPQSRSPDFTHENPLETRNICFFSTNCVEGTARGIVIATGDSTVMGRIASLTSGLAVGQTPIAAEIEHFIHLITVVAVFLGVTFFALSLLLGYGWLEAIIFLIGIIVANVPEGLLATVTVCLTLTAKRMARKNCLVKNLEAVETLGSTSTICSDKTGTLTQNRMTVAHMWFDMTVYEADTTEEQTGKTFTKSSDTWFMLARIAGLCNRADFKANQEILPIAKRATTGDASESALLKFIEQSYSSVAEMREKNPKVAEIPFNSTNKYQMSIHLREDSSQTHVLMMKGAPERILEFCSTFLLNGQEYSMNDEMKEAFQNAYLELGGLGERVLGFCFLNLPSSFSKGFPFNTDEINFPMDNLCFVGLISMIDPPRAAVPDAVSKCRSAGIKVIMVTGDHPITAKAIAKGVGIISEGTETAEEVAARLKIPISKVDASAAKAIVVHGAELKDIQSKQLDQILQNHPEIVFARTSPQQKLIIVEGCQRLGAVVAVTGDGVNDSPALKKADIGIAMGISGSDVSKQAADMILLDDNFASIVTGVEEGRLIFDNLKKSIMYTLTSNIPEITPFLMFIILGIPLPLGTITILCIDLGTDMVPAISLAYESAESDIMKRLPRNPKTDNLVNHRLIGMAYGQIGMIQALAGFFTYFVILAENGFRPVDLLGIRLHWEDKYLNDLEDSYGQQWTYEQRKVVEFTCQTAFFVTIVVVQWADLIISKTRRNSLFQQGMRNKVLIFGILEETLLAAFLSYTPGMDVALRMYPLKITWWLCAIPYSILIFVYDEIRKLLIRQHPDGWVERETYY

SEQ ID NO: 315 - protein, 279 aa, synthetic construct
  REGION 1..279: note = ATP2B1
MTKNEKKSLNQSLAEWKLFIYNPTTGEFLGRTAKSWGLILLFYLVFYGFLAALFSFTMWVMLQTLNDEVPKYRDQIPSPGLMVFPKPVTALEYTFSRSDPTSYAGYIEDLKKFLKPYTLEEQKNLTVCPDGALFEQKGPVYVACQFPISLLQACSGMNDPDFGYSQGNPCILVKMNRIIGLKPEGVPRIDCVSKNEDIPNVAVYPHNGMIDLKYFPYYGKKLHVGYLQPLVAVQVSFAPNNTGKEVTVECKIDGSANLKSQDDRDKFLGRVMFKITARA

SEQ ID NO: 316 - protein, 1258 aa, synthetic construct
  REGION 1..1258: note = ATP2B2
MGDMANNSVAYSGVKNSLKEANHDGDFGITLAELRALMELRSTDALRKIQESYGDVYGICTKLKTSPNEGLSGNPADLERREAVFGKNFIPPKKPKTFLQLVWEALQDVTLIILEIAAIVSLGLSFYQPPEGDNALCGEVSVGEEEGEGETGWIEGAAILLSVVCVVLVTAFNDWSKEKQFRGLQSRIEQEQKFTVIRGGQVIQIPVADITVGDIAQVKYGDLLPADGILIQGNDLKIDESSLTGESDHVKKSLDKDPLLLSGTHVMEGSGRMVVTAVGVNSQTGIIFTLLGAGGEEEEKKDEKKKEKKNKKQDGAIENRNKAKAQDGAAMEMQPLKSEEGGDGDEKDKKKANLPKKEKSVLQGKLTKLAVQIGKAGLLMSAITVIILVLYFVIDTFWVQKRPWLAECTPIYIQYFVKFFIIGVTVLVVAVPEGLPLAVTISLAYSVKKMMKDNNLVRHLDACETMGNATAICSDKTGTLTMNRMTVVQAYINEKHYKKVPEPEAIPPNILSYLVTGISVNCAYTSKILPPEKEGGLPRHVGNKTECALLGLLLDLKRDYQDVRNEIPEEALYKVYTFNSVRKSMSTVLKNSDGSYRIFSKGASEIILKKCFKILSANGEAKVFRPRDRDDIVKTVIEPMASEGLRTICLAFRDFPAGEPEPEWDNENDIVTGLTCIAVVGIEDPVRPEVPDAIKKCQRAGITVRMVTGDNINTARAIATKCGILHPGEDFLCLEGKDFNRRIRNEKGEIEQERIDKIWPKLRVLARSSPTDKHTLVKGIIDSTVSDQRQVVAVTGDGTNDGPALKKADVGFAMGIAGTDVAKEASDIILTDDNFTSIVKAVMWGRNVYDSISKFLQFQLTVNVVAVIVAFTGACITQDSPLKAVQMLWVNLIMDTLASLALATEPPTESLLLRKPYGRNKPLISRTMMKNILGHAFYQLVVVFTLLFAGEKFFDIDSGRNAPLHAPPSEHYTIVFNTFVLMQLFNEINARKIHGERNVFEGIFNNAIFCTIVLGTFVVQIIIVQFGGKPFSCSELSIEQWLWSIFLGMGTLLWGQLISTIPTSRLKFLKEAGHGTQKEEIPEEELAEDVEEIDHAERELRRGQILWFRGLNRIQTQMDVVNAFQSGSSIQGALRRQPSIASQHHDVTNISTPTHIRVVNAFRSSLYEGLEKPESRSSIHNFMTHPEFRIEDSEPHIPLIDDTDAEDDAPTKRNSSPPPSPNKNNNAVDSGIHLTIEMNKSATSSSPGSPLHSLETSL

SEQ ID NO: 317 - protein, 1272 aa, synthetic construct
  REGION 1..1272: note = ATP2B3
MGDMTNSDFYSKNQRNESSHGGEFGCTMEELRSLMELRGTEAVVKIKETYGDTEAICRRLKTSPVEGLPGTAPDLEKRKQIFGQNFIPPKKPKTFLQLVWEALQDVTLIILEIAAIISLGLSFYHPPGEGNEGCATAQGGAEDEGEAEAGWIEGAAILLSVICVVLVTAFNDWSKEKQFRGLQSRIEQEQKFTVVRAGQVVQIPVAEIVVGDIAQVKYGDLLPADGLFIQGNDLKIDESSLTGESDQVRKSVDKDPMLLSGTHVMEGSGRMLVTAVGVNSQTGIIFTLLGAGGEEEEKKDKKGVKKGDGLQLPAADGAAASNAADSANASLVNGKMQDGNVDASQSKAKQQDGAAAMEMQPLKSAEGGDADDRKKASMHKKEKSVLQGKLTKLAVQIGKAGLVMSAITVIILVLYFTVDTFVVNKKPWLPECTPVYVQYFVKFFIIGVTVLVVAVPEGLPLAVTISLAYSVKKMMKDNNLVRHLDACETMGNATAICSDKTGTLTTNRMTVVQAYVGDVHYKEIPDPSSINTKTMELLINAIAINSAYTTKILPPEKEGALPRQVGNKTECGLLGFVLDLKQDYEPVRSQMPEEKLYKVYTFNSVRKSMSTVIKLPDESFRMYSKGASEIVLKKCCKILNGAGEPRVFRPRDRDEMVKKVIEPMACDGLRTICVAYRDFPSSPEPDWDNENDILNELTCICVVGIEDPVRPEVPEAIRKCQRAGITVRMVTGDNINTARAIAIKCGIIHPGEDFLCLEGKEFNRRIRNEKGEIEQERIDKIWPKLRVLARSSPTDKHTLVKGIIDSTHTEQRQVVAVTGDGTNDGPALKKADVGFAMGIAGTDVAKEASDIILTDDNFSSIVKAVMWGRNVYDSISKFLQFQLTVNVVAVIVAFTGACITQDSPLKAVQMLWVNLIMDTFASLALATEPPTETLLLRKPYGRNKPLISRTMMKNILGHAVYQLALIFTLLFVGEKMFQIDSGRNAPLHSPPSEHYTIIFNTFVMMQLFNEINARKIHGERNVFDGIFRNPIFCTIVLGTFAIQIVIVQFGGKPFSCSPLQLDQWMWCIFIGLGELVWGQVIATIPTSRLKFLKEAGRLTQKEEIPEEELNEDVEEIDHAERELRRGQILWFRGLNRIQTQIEVVNTFKSGASFQGALRRQSSVTSQSQDIRVVKAFRSSLYEGLEKPESRTSIHNFMAHPEFRIEDSQPHIPLIDDTDLEEDAALKQNSSPPSSLNKNNSAIDSGINLTTDTSKSATSSSPGSPIHSLETSL

SEQ ID NO: 318 - protein, 874 aa, synthetic construct
  REGION 1..874: note = ATP2B4
MGDMANSSIEFHPKPQQQRDVPQAGGFGCTLAELRTLMELRGAEALQKIEEAYGDVSGLCRRLKTSPTEGLADNTNDLEKRRQIYGQNFIPPKQPKTFLQLVWEALQDVTLIILEVAAIVSLGLSFYAPPGEESEACGNVSGGAEDEGEAEAGWIEGAAILLSVICVVLVTAFNDWSKEKQFRGLQSRIEQEQKFTVIRNGQLLQVPVAALVVGDIAQVKYGDLLPADGVLIQANDLKIDESSLTGESDHVRKSADKDPMLLSGTHVMEGSGRMVVTAVGVNSQTGIIFTLLGAGGEEEEKKDKKGKQQDGAMESSQTKAKKQDGAVAMEMQPLKSAEGGEMEEREKKKANAPKKEKSVLQGKLTKLAVQIGKAGLVMSAITVIILVLYFVIETFVVEGRTWLAECTPVYVQYFVKFFIIGVTVLVVAVPEGLPLAVTISLAYSVKKMMKDNNLVRHLDACETMGNATAICSDKTGTLTTNRMTVVQSYLGDTHYKEIPAPSALTPKILDLLVHAISINSAYTTKILPPEKEGALPRQVGNKTECALLGFVLDLKRDFQPVREQIPEDKLYKVYTFNSVRKSMSTVIRMPDGGFRLFSKGASEILLKKCTNILNSNGELRGFRPRDRDDMVRKIIEPMACDGLRTICIAYRDFSAGQEPDWDNENEVVGDLTCIAVVGIEDPVRPEVPEAIRKCQRAGITVRMVTGDNINTARAIAAKCGIIQPGEDFLCLEGKEFNRRIRNEKGEIEQERLDKVWPKLRVLARSSPTDKHTLVKGIIDSTTGEQRQVVAVTGDGTNDGPALKKADVGFAMGIAGTDVAKEASDIILTDDNFTSIVKAVMWGRNVYDSISKFLQFQLTVNVVAVIVAFTGACIT

SEQ ID NO: 319 - protein, 731 aa, synthetic construct
  REGION 1..731: note = PTGFRN Protein Fragment #1
PSARPPPSLSLREGEPFELRCTAASASPLHTHLALLWEVHRGPARRSVLALTHEGRFHPGLGYEQRYHSGDVRLDTVGSDAYRLSVSRALSADQGSYRCIVSEWIAEQGNWQEIQEKAVEVATVVIQPSVLRAAVPKNVSVAEGKELDLTCNITTDRADDVRPEVTWSFSRMPDSTLPGSRVLARLDRDSLVHSSPHVALSHVDARSYHLLVRDVSKENSGYYYCHVSLWAPGHNRSWHKVAEAVSSPAGVGVTWLEPDYQVYLNASKVPGFADDPTELACRVVDTKSGEANVRFTVSWYYRMNRRSDNVVTSELLAVMDGDWTLKYGERSKQRAQDGDFIFSKEHTDTFNFRIQRTTEEDRGNYYCVVSAWTKQRNNSWVKSKDVFSKPVNIFWALEDSVLVVKARQPKPFFAAGNTFEMTCKVSSKNIKSPRYSVLIMAEKPVGDLSSPNETKYIISLDQDSVVKLENWTDASRVDGVVLEKVQEDEFRYRMYQTQVSDAGLYRCMVTAWSPVRGSLWREAATSLSNPIEIDFQTSGPIFNASVHSDTPSVIRGDLIKLFCIITVEGAALDPDDMAFDVSWFAVHSFGLDKAPVLLSSLDRKGIVTTSRRDWKSDLSLERVSVLEFLLQVHGSEDQDFGNYYCSVTPWVKSPTGSWQKEAEIHSKPVFITVKMDVLNAFKYPLLIGVGLSTVIGLLSCLIGYCSSHWCCKKEVQETRRERRRLMSMEMD

SEQ ID NO: 320 - protein, 611 aa, synthetic construct
  REGION 1..611: note = PTGFRN Protein Fragment #2
VATVVIQPSVLRAAVPKNVSVAEGKELDLTCNITTDRADDVRPEVTWSFSRMPDSTLPGSRVLARLDRDSLVHSSPHVALSHVDARSYHLLVRDVSKENSGYYYCHVSLWAPGHNRSWHKVAEAVSSPAGVGVTWLEPDYQVYLNASKVPGFADDPTELACRVVDTKSGEANVRFTVSWYYRMNRRSDNVVTSELLAVMDGDWTLKYGERSKQRAQDGDFIFSKEHTDTFNFRIQRTTEEDRGNYYCVVSAWTKQRNNSWVKSKDVFSKPVNIFWALEDSVLVVKARQPKPFFAAGNTFEMTCKVSSKNIKSPRYSVLIMAEKPVGDLSSPNETKYIISLDQDSVVKLENWTDASRVDGVVLEKVQEDEFRYRMYQTQVSDAGLYRCMVTAWSPVRGSLWREAATSLSNPIEIDFQTSGPIFNASVHSDTPSVIRGDLIKLFCIITVEGAALDPDDMAFDVSWFAVHSFGLDKAPVLLSSLDRKGIVTTSRRDWKSDLSLERVSVLEFLLQVHGSEDQDFGNYYCSVTPWVKSPTGSWQKEAEIHSKPVFITVKMDVLNAFKYPLLIGVGLSTVIGLLSCLIGYCSSHWCCKKEVQETRRERRRLMSMEMD

SEQ ID NO: 321 - protein, 485 aa, synthetic construct
  REGION 1..485: note = PTGFRN Protein Fragment #3
SPAGVGVTWLEPDYQVYLNASKVPGFADDPTELACRVVDTKSGEANVRFTVSWYYRMNRRSDNVVTSELLAVMDGDWTLKYGERSKQRAQDGDFIFSKEHTDTFNFRIQRTTEEDRGNYYCVVSAWTKQRNNSWVKSKDVFSKPVNIFWALEDSVLVVKARQPKPFFAAGNTFEMTCKVSSKNIKSPRYSVLIMAEKPVGDLSSPNETKYIISLDQDSVVKLENWTDASRVDGVVLEKVQEDEFRYRMYQTQVSDAGLYRCMVTAWSPVRGSLWREAATSLSNPIEIDFQTSGPIFNASVHSDTPSVIRGDLIKLFCIITVEGAALDPDDMAFDVSWFAVHSFGLDKAPVLLSSLDRKGIVTTSRRDWKSDLSLERVSVLEFLLQVHGSEDQDFGNYYCSVTPWVKSPTGSWQKEAEIHSKPVFITVKMDVLNAFKYPLLIGVGLSTVIGLLSCLIGYCSSHWCCKKEVQETRRERRRLMSMEMD

SEQ ID NO: 322 - protein, 343 aa, synthetic construct
  REGION 1..343: note = PTGFRN Protein Fragment #4
KPVNIFWALEDSVLVVKARQPKPFFAAGNTFEMTCKVSSKNIKSPRYSVLIMAEKPVGDLSSPNETKYIISLDQDSVVKLENWTDASRVDGVVLEKVQEDEFRYRMYQTQVSDAGLYRCMVTAWSPVRGSLWREAATSLSNPIEIDFQTSGPIFNASVHSDTPSVIRGDLIKLFCIITVEGAALDPDDMAFDVSWFAVHSFGLDKAPVLLSSLDRKGIVTTSRRDWKSDLSLERVSVLEFLLQVHGSEDQDFGNYYCSVTPWVKSPTGSWQKEAEIHSKPVFITVKMDVLNAFKYPLLIGVGLSTVIGLLSCLIGYCSSHWCCKKEVQETRRERRRLMSMEMD

SEQ ID NO: 323 - protein, 217 aa, synthetic construct
  REGION 1..217: note = PTGFRN Protein Fragment #5
VRGSLWREAATSLSNPIEIDFQTSGPIFNASVHSDTPSVIRGDLIKLFCIITVEGAALDPDDMAFDVSWFAVHSFGLDKAPVLLSSLDRKGIVTTSRRDWKSDLSLERVSVLEFLLQVHGSEDQDFGNYYCSVTPWVKSPTGSWQKEAEIHSKPVFITVKMDVLNAFKYPLLIGVGLSTVIGLLSCLIGYCSSHWCCKKEVQETRRERRRLMSMEMD

SEQ ID NO: 324 - protein, 66 aa, synthetic construct
  REGION 1..66: note = PTGFRN Protein Fragment #6
SKPVFITVKMDVLNAFKYPLLIGVGLSTVIGLLSCLIGYCSSHWCCKKEVQETRRERRRLMSMEMD

SEQ ID NO: 325 - protein, 21 aa, synthetic construct
  REGION 1..21: note = PTGFRN Protein - Signal Peptide
MGRLASRPLLLALLSLALCRG

SEQ ID NO: 326 - protein, 247 aa, synthetic construct
  REGION 1..247: note = BSG Protein Fragment #1
PGTVFTTVEDLGSKILLTCSLNDSATEVTGHRWLKGGVVLKEDALPGQKTEFKVDSDDQWGEYSCVFLPEPMGTANIQLHGPPRVKAVKSSEHINEGETAMLVCKSESVPPVTDWAWYKITDSEDKALMNGSESRFFVSSSQGRSELHIENLNMEADPGQYRCNGTSSKGSDQAIITLRVRSHLAALWPFLGIVAEVLVLVTIIFIYEKRRKPEDVLDDDDAGSAPLKSSGQHQNDKGKNVRQRNSS

SEQ ID NO: 327 - protein, 168 aa, synthetic construct
  REGION 1..168: note = BSG Protein Fragment #2
HGPPRVKAVKSSEHINEGETAMLVCKSESVPPVTDWAWYKITDSEDKALMNGSESRFFVSSSQGRSELHIENLNMEADPGQYRCNGTSSKGSDQAIITLRVRSHLAALWPFLGIVAEVLVLVTIIFIYEKRRKPEDVLDDDDAGSAPLKSSGQHQNDKGKNVRQRNSS

SEQ ID NO: 328 - protein, 66 aa, synthetic construct
  REGION 1..66: note = BSG Protein Fragment #3
SHLAALWPFLGIVAEVLVLVTIIFIYEKRRKPEDVLDDDDAGSAPLKSSGQHQNDKGKNVRQRNSS

SEQ ID NO: 329 - protein, 18 aa, synthetic construct
  REGION 1..18: note = BSG Protein - Signal Peptide
MAAALFVLLGFALLGTHG

SEQ ID NO: 330 - protein, 456 aa, synthetic construct
  REGION 1..456: note = IGSF8 Protein Fragment #1
APPGPRGRQAPTSPPRMTVHEGQELALGCLARTSTQKHTHLAVSFGRSVPEAPVGRSTLQEVVGIRSDLAVEAGAPYAERLAAGELRLGKEGTDRYRMVVGGAQAGDAGTYHCTAAEWIQDPDGSWAQIAEKRAVLAHVDVQTLSSQLAVTVGPGERRIGPGEPLELLCNVSGALPPAGRHAAYSVGWEMAPAGAPGPGRLVAQLDTEGVGSLGPGYEGRHIAMEKVASRTYRLRLEAARPGDAGTYRCLAKAYVRGSGTRLREAASARSRPLPVHVREEGVVLEAVAWLAGGTVYRGETASLLCNISVRGGPPGLRLAASWWVERPEDGELSSVPAQLVGGVGQDGVAELGVRPGGGPVSVELVGPRSHRLRLHSLGPEDEGVYHCAPSAWVQHADYSWYQAGSARSGPVTVYPYMHALDTLFVPLLVGTGVALVTGATVLGTITCCFMKRLRKR

SEQ ID NO: 331 - protein, 320 aa, synthetic construct
  REGION 1..320: note = IGSF8 Protein Fragment #2
AHVDVQTLSSQLAVTVGPGERRIGPGEPLELLCNVSGALPPAGRHAAYSVGWEMAPAGAPGPGRLVAQLDTEGVGSLGPGYEGRHIAMEKVASRTYRLRLEAARPGDAGTYRCLAKAYVRGSGTRLREAASARSRPLPVHVREEGVVLEAVAWLAGGTVYRGETASLLCNISVRGGPPGLRLAASWWVERPEDGELSSVPAQLVGGVGQDGVAELGVRPGGGPVSVELVGPRSHRLRLHSLGPEDEGVYHCAPSAWVQHADYSWYQAGSARSGPVTVYPYMHALDTLFVPLLVGTGVALVTGATVLGTITCCFMKRLRKR

SEQ ID NO: 332 - protein, 179 aa, synthetic construct
  REGION 1..179: note = IGSF8 Protein Fragment #3
REEGVVLEAVAWLAGGTVYRGETASLLCNISVRGGPPGLRLAASWWVERPEDGELSSVPAQLVGGVGQDGVAELGVRPGGGPVSVELVGPRSHRLRLHSLGPEDEGVYHCAPSAWVQHADYSWYQAGSARSGPVTVYPYMHALDTLFVPLLVGTGVALVTGATVLGTITCCFMKRLRKR

SEQ ID NO: 333 - protein, 24 aa, synthetic construct
  REGION 1..24: note = IGSF8 Protein Fragment #4
VALVTGATVLGTITCCFMKRLRKR

SEQ ID NO: 334 - protein, 27 aa, synthetic construct
  REGION 1..27: note = IGSF8 Protein - Signal Peptide
MGALRPTLLPPSLPLLLLLMLGMGCWA

SEQ ID NO: 335-400 - skipped (66 entries)

SEQ ID NO: 401 - protein, 332 aa, synthetic construct
  REGION 1..332: note = The MARCKS protein
MGAQFSKTAAKGEAAAERPGEAAVASSPSKANGQENGHVKVNGDASPAAAESGAKEELQANGSAPAADKEEPAAAGSGAASPSAAEKGEPAAAAAPEAGASPVEKEAPAEGEAAEPGSPTAAEGEAASAASSTSSPKAEDGATPSPSNETPKKKKKRFSFKKSFKLSGFSFKKNKKEAGEGGEAEAPAAEGGKDEAAGGAAAAAAEAGAASGEQAAAPGEEAAAGEEGAAGGDPQEAKPQEAAVAPEKPPASDETKAAEEPSKVEEKKAEEAGASAAACEAPSAAGPGAPPEQEAAPAEEPAAAAASSACAAPSQEAQPECSPEAPPAEAAE

SEQ ID NO: 402 - protein, 195 aa, synthetic construct
  REGION 1..195: note = The MARCKSL1 protein
MGSQSSKAPRGDVTAEEAAGASPAKANGQENGHVKSNGDLSPKGEGESPPVNGTDEAAGATGDAIEPAPPSQGAEAKGEVPPKETPKKKKKFSFKKPFKLSGLSFKRNRKEGGGDSSASSPTEEEQEQGEIGACSDEGTAQEGKAAATPESQEPQAKGAEASAASEEEAGPQATEPSTPSGPESGPTPASAEQNE

SEQ ID NO: 403 - protein, 227 aa, synthetic construct
  REGION 1..227: note = The BASP1 protein
MGGKLSKKKKGYNVNDEKAKEKDKKAEGAATEEEGTPKESEPQAAAEPAEAKEGKEKPDQDAEGKAEEKEGEKDAAAAKEEAPKAEPEKTEGAAEAKAEPPKAPEQEQAAPGPAAGGEAPKAAEAAAAPAESAAPAAGEEPSKEEGEPKKTEAPAAPAAQETKSDGAPASDSKPGSSEAAPSSKETPAATEAPSSTPKAQGPAASAEEPKPVEAPAANSDQTVTVKE

SEQ ID NO: 404 - protein, 8 aa, synthetic construct
  REGION 1..8: note = Synthetic Peptide
  SITE 2: note = misc_feature - Wherein Xaa can be Alanine or any other Amino Acid
GXKLSKKK

SEQ ID NO: 405 - protein, 4 aa, synthetic construct
  REGION 1..4: note = Synthetic Peptide
KKKK

SEQ ID NO: 406 - protein, 5 aa, synthetic construct
  REGION 1..5: note = Synthetic Peptide
KKKKK

SEQ ID NO: 407 - protein, 4 aa, synthetic construct
  REGION 1..4: note = Synthetic Peptide
RRRR

SEQ ID NO: 408 - protein, 5 aa, synthetic construct
  REGION 1..5: note = Synthetic Peptide
RRRRR

SEQ ID NO: 409-410 - skipped (2 entries)

SEQ ID NO: 411 - protein, 7 aa, synthetic construct
  REGION 1..7: note = Synthetic Peptide
GGKLSKK

SEQ ID NO: 412 - protein, 7 aa, synthetic construct
  REGION 1..7: note = Synthetic Peptide
GAKLSKK

SEQ ID NO: 413 - protein, 7 aa, synthetic construct
  REGION 1..7: note = Synthetic Peptide
GGKQSKK

SEQ ID NO: 414 - protein, 7 aa, synthetic construct
  REGION 1..7: note = Synthetic Peptide
GGKLAKK

SEQ ID NO: 415 - protein, 6 aa, synthetic construct
  REGION 1..6: note = Synthetic Peptide
GGKLSK

SEQ ID NO: 416 - protein, 6 aa, synthetic construct
  REGION 1..6: note = Synthetic Peptide
GAKLSK

SEQ ID NO: 417 - protein, 6 aa, synthetic construct
  REGION 1..6: note = Synthetic Peptide
GGKQSK

SEQ ID NO: 418 - protein, 6 aa, synthetic construct
  REGION 1..6: note = Synthetic Peptide
GGKLAK

SEQ ID NO: 419 - protein, 4 aa, synthetic construct
  REGION 1..4: note = Synthetic Peptide
KKKG

SEQ ID NO: 420 - protein, 5 aa, synthetic construct
  REGION 1..5: note = Synthetic Peptide
KKKGY

SEQ ID NO: 421 - protein, 6 aa, synthetic construct
  REGION 1..6: note = Synthetic Peptide
KKKGYN

SEQ ID NO: 422 - protein, 7 aa, synthetic construct
  REGION 1..7: note = Synthetic Peptide
KKKGYNV

SEQ ID NO: 423 - protein, 8 aa, synthetic construct
  REGION 1..8: note = Synthetic Peptide
KKKGYNVN

SEQ ID NO: 424 - protein, 6 aa, synthetic construct
  REGION 1..6: note = Synthetic Peptide
KKKGYS

SEQ ID NO: 425 - protein, 6 aa, synthetic construct
  REGION 1..6: note = Synthetic Peptide
KKKGYG

SEQ ID NO: 426 - protein, 7 aa, synthetic construct
  REGION 1..7: note = Synthetic Peptide
KKKGYGG

SEQ ID NO: 427 - protein, 5 aa, synthetic construct
  REGION 1..5: note = Synthetic Peptide
KKKGS

SEQ ID NO: 428 - protein, 6 aa, synthetic construct
  REGION 1..6: note = Synthetic Peptide
KKKGSG

SEQ ID NO: 429 - protein, 7 aa, synthetic construct
  REGION 1..7: note = Synthetic Peptide
KKKGSGS

SEQ ID NO: 430 - protein, 4 aa, synthetic construct
  REGION 1..4: note = Synthetic Peptide
KKKS

SEQ ID NO: 431 - protein, 5 aa, synthetic construct
  REGION 1..5: note = Synthetic Peptide
KKKSG

SEQ ID NO: 432 - protein, 6 aa, synthetic construct
  REGION 1..6: note = Synthetic Peptide
KKKSGG

SEQ ID NO: 433 - protein, 7 aa, synthetic construct
  REGION 1..7: note = Synthetic Peptide
KKKSGGS

SEQ ID NO: 434 - protein, 8 aa, synthetic construct
  REGION 1..8: note = Synthetic Peptide
KKKSGGSG

SEQ ID NO: 435 - protein, 8 aa, synthetic construct
  REGION 1..8: note = Synthetic Peptide
KKSGGSGG

SEQ ID NO: 436 - protein, 10 aa, synthetic construct
  REGION 1..10: note = Synthetic Peptide
KKKSGGSGGS

SEQ ID NO: 437 - protein, 8 aa, synthetic construct
  REGION 1..8: note = Synthetic Peptide
KRFSFKKS

SEQ ID NO: 438 - protein, 8 aa, synthetic construct
  REGION 1..8: note = Synthetic Peptide
GGKLSKKK

SEQ ID NO: 439 - protein, 8 aa, synthetic construct
  REGION 1..8: note = Synthetic Peptide
GGKLSKKS

SEQ ID NO: 440 - protein, 8 aa, synthetic construct
  REGION 1..8: note = Synthetic Peptide
GAKLSKKK

SEQ ID NO: 441 - protein, 8 aa, synthetic construct
  REGION 1..8: note = Synthetic Peptide
GAKLSKKS

SEQ ID NO: 442 - protein, 8 aa, synthetic construct
  REGION 1..8: note = Synthetic Peptide
GGKQSKKK

SEQ ID NO: 443 - protein, 8 aa, synthetic construct
  REGION 1..8: note = Synthetic Peptide
GGKQSKKS

SEQ ID NO: 444 - protein, 8 aa, synthetic construct
  REGION 1..8: note = Synthetic Peptide
GGKLAKKK

SEQ ID NO: 445 - protein, 8 aa, synthetic construct
  REGION 1..8: note = Synthetic Peptide
GGKLAKKS

SEQ ID NO: 446 - protein, 14 aa, synthetic construct
  REGION 1..14: note = Synthetic Peptide
GGKLSKKKKGYNVN

SEQ ID NO: 447 - protein, 14 aa, synthetic construct
  REGION 1..14: note = Synthetic Peptide
GAKLSKKKKGYNVN

SEQ ID NO: 448 - protein, 14 aa, synthetic construct
  REGION 1..14: note = Synthetic Peptide
GGKQSKKKKGYNVN

SEQ ID NO: 449 - protein, 14 aa, synthetic construct
  REGION 1..14: note = Synthetic Peptide
GGKLAKKKKGYNVN

SEQ ID NO: 450 - protein, 14 aa, synthetic construct
  REGION 1..14: note = Synthetic Peptide
GGKLSKKKKGYSGG

SEQ ID NO: 451 - protein, 14 aa, synthetic construct
  REGION 1..14: note = Synthetic Peptide
GGKLSKKKKGSGGS

SEQ ID NO: 452 - protein, 14 aa, synthetic construct
  REGION 1..14: note = Synthetic Peptide
GGKLSKKKKSGGSG

SEQ ID NO: 453 - protein, 14 aa, synthetic construct
  REGION 1..14: note = Synthetic Peptide
GGKLSKKKSGGSGG

SEQ ID NO: 454 - protein, 14 aa, synthetic construct
  REGION 1..14: note = Synthetic Peptide
GGKLSKKSGGSGGS

SEQ ID NO: 455 - protein, 14 aa, synthetic construct
  REGION 1..14: note = Synthetic Peptide
GGKLSKSGGSGGSV

SEQ ID NO: 456 - protein, 14 aa, synthetic construct
  REGION 1..14: note = Synthetic Peptide
GAKKSKKRFSFKKS

SEQ ID NO: 457 - protein, 29 aa, synthetic construct
  REGION 1..29: note = Synthetic Peptide
GGKLSKKKKGYNVNDEKAKEKDKKAEGAA

SEQ ID NO: 458 - protein, 28 aa, synthetic construct
  REGION 1..28: note = Synthetic Peptide
GGKLSKKKKGYNVNDEKAKEKDKKAEGA

SEQ ID NO: 459 - protein, 27 aa, synthetic construct
  REGION 1..27: note = Synthetic Peptide
GGKLSKKKKGYNVNDEKAKEKDKKAEG

SEQ ID NO: 460 - protein, 26 aa, synthetic construct
  REGION 1..26: note = Synthetic Peptide
GGKLSKKKKGYNVNDEKAKEKDKKAE

SEQ ID NO: 461 - protein, 25 aa, synthetic construct
  REGION 1..25: note = Synthetic Peptide
GGKLSKKKKGYNVNDEKAKEKDKKA

SEQ ID NO: 462 - protein, 24 aa, synthetic construct
  REGION 1..24: note = Synthetic Peptide
GGKLSKKKKGYNVNDEKAKEKDKK

SEQ ID NO: 463 - protein, 23 aa, synthetic construct
  REGION 1..23: note = Synthetic Peptide
GGKLSKKKKGYNVNDEKAKEKDK

SEQ ID NO: 464 - protein, 22 aa, synthetic construct
  REGION 1..22: note = Synthetic Peptide
GGKLSKKKKGYNVNDEKAKEKD

SEQ ID NO: 465 - protein, 21 aa, synthetic construct
  REGION 1..21: note = Synthetic Peptide
GGKLSKKKKGYNVNDEKAKEK

SEQ ID NO: 466 - protein, 20 aa, synthetic construct
  REGION 1..20: note = Synthetic Peptide
GGKLSKKKKGYNVNDEKAKE

SEQ ID NO: 467 - protein, 19 aa, synthetic construct
  REGION 1..19: note = Synthetic Peptide
GGKLSKKKKGYNVNDEKAK

SEQ ID NO: 468 - protein, 18 aa, synthetic construct
  REGION 1..18: note = Synthetic Peptide
GGKLSKKKKGYNVNDEKA

SEQ ID NO: 469 - protein, 17 aa, synthetic construct
  REGION 1..17: note = Synthetic Peptide
GGKLSKKKKGYNVNDEK

SEQ ID NO: 470 - protein, 16 aa, synthetic construct
  REGION 1..16: note = Synthetic Peptide
GGKLSKKKKGYNVNDE

SEQ ID NO: 471 - protein, 15 aa, synthetic construct
  REGION 1..15: note = Synthetic Peptide
GGKLSKKKKGYNVND

SEQ ID NO: 472 - protein, 13 aa, synthetic construct
  REGION 1..13: note = Synthetic Peptide
GGKLSKKKKGYNV

SEQ ID NO: 473 - protein, 12 aa, synthetic construct
  REGION 1..12: note = Synthetic Peptide
GGKLSKKKKGYN

SEQ ID NO: 474 - protein, 11 aa, synthetic construct
  REGION 1..11: note = Synthetic Peptide
GGKLSKKKKGY

SEQ ID NO: 475 - protein, 10 aa, synthetic construct
  REGION 1..10: note = Synthetic Peptide
GGKLSKKKKG

SEQ ID NO: 476 - protein, 9 aa, synthetic construct
  REGION 1..9: note = Synthetic Peptide
GGKLSKKKK

SEQ ID NO: 477 - protein, 29 aa, synthetic construct
  REGION 1..29: note = Synthetic Peptide
GAKKSKKRFSFKKSFKLSGFSFKKNKKEA

SEQ ID NO: 478 - protein, 28 aa, synthetic construct
  REGION 1..28: note = Synthetic Peptide
GAKKSKKRFSFKKSFKLSGFSFKKNKKE

SEQ ID NO: 479 - protein, 27 aa, synthetic construct
  REGION 1..27: note = Synthetic Peptide
GAKKSKKRFSFKKSFKLSGFSFKKNKK

SEQ ID NO: 480 - protein, 26 aa, synthetic construct
  REGION 1..26: note = Synthetic Peptide
GAKKSKKRFSFKKSFKLSGFSFKKNK

SEQ ID NO: 481 - protein, 25 aa, synthetic construct
  REGION 1..25: note = Synthetic Peptide
GAKKSKKRFSFKKSFKLSGFSFKKN

SEQ ID NO: 482 - protein, 24 aa, synthetic construct
  REGION 1..24: note = Synthetic Peptide
GAKKSKKRFSFKKSFKLSGFSFKK

SEQ ID NO: 483 - protein, 23 aa, synthetic construct
  REGION 1..23: note = Synthetic Peptide
GAKKSKKRFSFKKSFKLSGFSFK

SEQ ID NO: 484 - protein, 22 aa, synthetic construct
  REGION 1..22: note = Synthetic Peptide
GAKKSKKRFSFKKSFKLSGFSF

SEQ ID NO: 485 - protein, 21 aa, synthetic construct
  REGION 1..21: note = Synthetic Peptide
GAKKSKKRFSFKKSFKLSGFS

SEQ ID NO: 486 - protein, 20 aa, synthetic construct
  REGION 1..20: note = Synthetic Peptide
GAKKSKKRFSFKKSFKLSGF

SEQ ID NO: 487 - protein, 19 aa, synthetic construct
  REGION 1..19: note = Synthetic Peptide
GAKKSKKRFSFKKSFKLSG

SEQ ID NO: 488 - protein, 18 aa, synthetic construct
  REGION 1..18: note = Synthetic Peptide
GAKKSKKRFSFKKSFKLS

SEQ ID NO: 489 - protein, 17 aa, synthetic construct
  REGION 1..17: note = Synthetic Peptide
GAKKSKKRFSFKKSFKL

SEQ ID NO: 490 - protein, 16 aa, synthetic construct
  REGION 1..16: note = Synthetic Peptide
GAKKSKKRFSFKKSFK

SEQ ID NO: 491 - protein, 15 aa, synthetic construct
  REGION 1..15: note = Synthetic Peptide
GAKKSKKRFSFKKSF

SEQ ID NO: 492 - protein, 13 aa, synthetic construct
  REGION 1..13: note = Synthetic Peptide
GAKKSKKRFSFKK

SEQ ID NO: 493 - protein, 12 aa, synthetic construct
  REGION 1..12: note = Synthetic Peptide
GAKKSKKRFSFK

SEQ ID NO: 494 - protein, 11 aa, synthetic construct
  REGION 1..11: note = Synthetic Peptide
GAKKSKKRFSF

SEQ ID NO: 495 - protein, 10 aa, synthetic construct
  REGION 1..10: note = Synthetic Peptide
GAKKSKKRFS

SEQ ID NO: 496 - protein, 9 aa, synthetic construct
  REGION 1..9: note = Synthetic Peptide
GAKKSKKRF

SEQ ID NO: 497 - protein, 8 aa, synthetic construct
  REGION 1..8: note = Synthetic Peptide
GAKKSKKR

SEQ ID NO: 498 - protein, 7 aa, synthetic construct
  REGION 1..7: note = Synthetic Peptide
GAKKSKK

SEQ ID NO: 499 - protein, 29 aa, synthetic construct
  REGION 1..29: note = Synthetic Peptide
GAKKAKKRFSFKKSFKLSGFSFKKNKKEA

SEQ ID NO: 500 - protein, 28 aa, synthetic construct
  REGION 1..28: note = Synthetic Peptide
GAKKAKKRFSFKKSFKLSGFSFKKNKKE

SEQ ID NO: 501 - protein, 27 aa, synthetic construct
  REGION 1..27: note = Synthetic Peptide
GAKKAKKRFSFKKSFKLSGFSFKKNKK

SEQ ID NO: 502 - protein, 26 aa, synthetic construct
  REGION 1..26: note = Synthetic Peptide
GAKKAKKRFSFKKSFKLSGFSFKKNK

SEQ ID NO: 503 - protein, 25 aa, synthetic construct
  REGION 1..25: note = Synthetic Peptide
GAKKAKKRFSFKKSFKLSGFSFKKN

SEQ ID NO: 504 - protein, 24 aa, synthetic construct
  REGION 1..24: note = Synthetic Peptide
GAKKAKKRFSFKKSFKLSGFSFKK

SEQ ID NO: 505 - protein, 23 aa, synthetic construct
  REGION 1..23: note = Synthetic Peptide
GAKKAKKRFSFKKSFKLSGFSFK

SEQ ID NO: 506 - protein, 22 aa, synthetic construct
  REGION 1..22: note = Synthetic Peptide
GAKKAKKRFSFKKSFKLSGFSF

SEQ ID NO: 507 - protein, 21 aa, synthetic construct
  REGION 1..21: note = Synthetic Peptide
GAKKAKKRFSFKKSFKLSGFS

SEQ ID NO: 508 - protein, 20 aa, synthetic construct
  REGION 1..20: note = Synthetic Peptide
GAKKAKKRFSFKKSFKLSGF

SEQ ID NO: 509 - protein, 19 aa, synthetic construct
  REGION 1..19: note = Synthetic Peptide
GAKKAKKRFSFKKSFKLSG

SEQ ID NO: 510 - protein, 18 aa, synthetic construct
  REGION 1..18: note = Synthetic Peptide
GAKKAKKRFSFKKSFKLS

SEQ ID NO: 511 - protein, 17 aa, synthetic construct
  REGION 1..17: note = Synthetic Peptide
GAKKAKKRFSFKKSFKL

SEQ ID NO: 512 - protein, 16 aa, synthetic construct
  REGION 1..16: note = Synthetic Peptide
GAKKAKKRFSFKKSFK

SEQ ID NO: 513 - protein, 15 aa, synthetic construct
  REGION 1..15: note = Synthetic Peptide
GAKKAKKRFSFKKSF

SEQ ID NO: 514 - protein, 14 aa, synthetic construct
  REGION 1..14: note = Synthetic Peptide
GAKKAKKRFSFKKS

SEQ ID NO: 515 - protein, 13 aa, synthetic construct
  REGION 1..13: note = Synthetic Peptide
GAKKAKKRFSFKK

SEQ ID NO: 516 - protein, 12 aa, synthetic construct
  REGION 1..12: note = Synthetic Peptide
GAKKAKKRFSFK

SEQ ID NO: 517 - protein, 11 aa, synthetic construct
  REGION 1..11: note = Synthetic Peptide
GAKKAKKRFSF

SEQ ID NO: 518 - protein, 10 aa, synthetic construct
  REGION 1..10: note = Synthetic Peptide
GAKKAKKRFS

SEQ ID NO: 519 - protein, 9 aa, synthetic construct
  REGION 1..9: note = Synthetic Peptide
GAKKAKKRF

SEQ ID NO: 520 - protein, 8 aa, synthetic construct
  REGION 1..8: note = Synthetic Peptide
GAKKAKKR

SEQ ID NO: 521 - protein, 7 aa, synthetic construct
  REGION 1..7: note = Synthetic Peptide
GAKKAKK

SEQ ID NO: 522 - protein, 28 aa, synthetic construct
  REGION 1..28: note = Synthetic Peptide
GAQESKKKKKKRFSFKKSFKLSGFSFKK

SEQ ID NO: 523 - protein, 27 aa, synthetic construct
  REGION 1..27: note = Synthetic Peptide
GAQESKKKKKKRFSFKKSFKLSGFSFK

SEQ ID NO: 524 - protein, 26 aa, synthetic construct
  REGION 1..26: note = Synthetic Peptide
GAQESKKKKKKRFSFKKSFKLSGFSF

SEQ ID NO: 525 - protein, 25 aa, synthetic construct
  REGION 1..25: note = Synthetic Peptide
GAQESKKKKKKRFSFKKSFKLSGFS

SEQ ID NO: 526 - protein, 24 aa, synthetic construct
  REGION 1..24: note = Synthetic Peptide
GAQESKKKKKKRFSFKKSFKLSGF

SEQ ID NO: 527 - protein, 23 aa, synthetic construct
  REGION 1..23: note = Synthetic Peptide
GAQESKKKKKKRFSFKKSFKLSG

SEQ ID NO: 528 - protein, 22 aa, synthetic construct
  REGION 1..22: note = Synthetic Peptide
GAQESKKKKKKRFSFKKSFKLS

SEQ ID NO: 529 - protein, 21 aa, synthetic construct
  REGION 1..21: note = Synthetic Peptide
GAQESKKKKKKRFSFKKSFKL

SEQ ID NO: 530 - protein, 20 aa, synthetic construct
  REGION 1..20: note = Synthetic Peptide
GAQESKKKKKKRFSFKKSFK

SEQ ID NO: 531 - protein, 19 aa, synthetic construct
  REGION 1..19: note = Synthetic Peptide
GAQESKKKKKKRFSFKKSF

SEQ ID NO: 532 - protein, 18 aa, synthetic construct
  REGION 1..18: note = Synthetic Peptide
GAQESKKKKKKRFSFKKS

SEQ ID NO: 533 - protein, 17 aa, synthetic construct
  REGION 1..17: note = Synthetic Peptide
GAQESKKKKKKRFSFKK

SEQ ID NO: 534 - protein, 16 aa, synthetic construct
  REGION 1..16: note = Synthetic Peptide
GAQESKKKKKKRFSFK

SEQ ID NO: 535 - protein, 15 aa, synthetic construct
  REGION 1..15: note = Synthetic Peptide
GAQESKKKKKKRFSF

SEQ ID NO: 536 - protein, 14 aa, synthetic construct
  REGION 1..14: note = Synthetic Peptide
GAQESKKKKKKRFS

SEQ ID NO: 537 - protein, 13 aa, synthetic construct
  REGION 1..13: note = Synthetic Peptide
GAQESKKKKKKRF

SEQ ID NO: 538 - protein, 12 aa, synthetic construct
  REGION 1..12: note = Synthetic Peptide
GAQESKKKKKKR

SEQ ID NO: 539 - protein, 11 aa, synthetic construct
  REGION 1..11: note = Synthetic Peptide
GAQESKKKKKK

SEQ ID NO: 540 - protein, 10 aa, synthetic construct
  REGION 1..10: note = Synthetic Peptide
GAQESKKKKK

SEQ ID NO: 541 - protein, 9 aa, synthetic construct
  REGION 1..9: note = Synthetic Peptide
GAQESKKKK

SEQ ID NO: 542 - protein, 8 aa, synthetic construct
  REGION 1..8: note = Synthetic Peptide
GAQESKKK

SEQ ID NO: 543 - protein, 7 aa, synthetic construct
  REGION 1..7: note = Synthetic Peptide
GAQESKK

SEQ ID NO: 544 - protein, 30 aa, synthetic construct
  REGION 1..30: note = Synthetic Peptide
GSQSSKKKKKKFSFKKPFKLSGLSFKRNRK

SEQ ID NO: 545 - protein, 29 aa, synthetic construct
  REGION 1..29: note = Synthetic Peptide
GSQSSKKKKKKFSFKKPFKLSGLSFKRNR

SEQ ID NO: 546 - protein, 28 aa, synthetic construct
  REGION 1..28: note = Synthetic Peptide
GSQSSKKKKKKFSFKKPFKLSGLSFKRN

SEQ ID NO: 547 - protein, 27 aa, synthetic construct
  REGION 1..27: note = Synthetic Peptide
GSQSSKKKKKKFSFKKPFKLSGLSFKR

SEQ ID NO: 548 - protein, 26 aa, synthetic construct
  REGION 1..26: note = Synthetic Peptide
GSQSSKKKKKKFSFKKPFKLSGLSFK

SEQ ID NO: 549 - protein, 25 aa, synthetic construct
  REGION 1..25: note = Synthetic Peptide
GSQSSKKKKKKFSFKKPFKLSGLSF

SEQ ID NO: 550 - protein, 24 aa, synthetic construct
  REGION 1..24: note = Synthetic Peptide
GSQSSKKKKKKFSFKKPFKLSGLS

SEQ ID NO: 551 - protein, 23 aa, synthetic construct
  REGION 1..23: note = Synthetic Peptide
GSQSSKKKKKKFSFKKPFKLSGL

SEQ ID NO: 552 - protein, 22 aa, synthetic construct
  REGION 1..22: note = Synthetic Peptide
GSQSSKKKKKKFSFKKPFKLSG

SEQ ID NO: 553 - protein, 21 aa, synthetic construct
  REGION 1..21: note = Synthetic Peptide
GSQSSKKKKKKFSFKKPFKLS

SEQ ID NO: 554 - protein, 20 aa, synthetic construct
  REGION 1..20: note = Synthetic Peptide
GSQSSKKKKKKFSFKKPFKL

SEQ ID NO: 555 - protein, 19 aa, synthetic construct
  REGION 1..19: note = Synthetic Peptide
GSQSSKKKKKKFSFKKPFK

SEQ ID NO: 556 - protein, 18 aa, synthetic construct
  REGION 1..18: note = Synthetic Peptide
GSQSSKKKKKKFSFKKPF

SEQ ID NO: 557 - protein, 17 aa, synthetic construct
  REGION 1..17: note = Synthetic Peptide
GSQSSKKKKKKFSFKKP

SEQ ID NO: 558 - protein, 16 aa, synthetic construct
  REGION 1..16: note = Synthetic Peptide
GSQSSKKKKKKFSFKK

SEQ ID NO: 559 - protein, 15 aa, synthetic construct
  REGION 1..15: note = Synthetic Peptide
GSQSSKKKKKKFSFK

SEQ ID NO: 560 - protein, 14 aa, synthetic construct
  REGION 1..14: note = Synthetic Peptide
GSQSSKKKKKKFSF

SEQ ID NO: 561 - protein, 13 aa, synthetic construct
  REGION 1..13: note = Synthetic Peptide
GSQSSKKKKKKFS

SEQ ID NO: 562 - protein, 12 aa, synthetic construct
  REGION 1..12: note = Synthetic Peptide
GSQSSKKKKKKF

SEQ ID NO: 563 - protein, 11 aa, synthetic construct
  REGION 1..11: note = Synthetic Peptide
GSQSSKKKKKK

SEQ ID NO: 564 - protein, 10 aa, synthetic construct
  REGION 1..10: note = Synthetic Peptide
GSQSSKKKKK

SEQ ID NO: 565 - protein, 9 aa, synthetic construct
  REGION 1..9: note = Synthetic Peptide
GSQSSKKKK

SEQ ID NO: 566 - protein, 8 aa, synthetic construct
  REGION 1..8: note = Synthetic Peptide
GSQSSKKK

SEQ ID NO: 567 - protein, 7 aa, synthetic construct
  REGION 1..7: note = Synthetic Peptide
GSQSSKK

SEQ ID NO: 568-597 - skipped (30 entries)

SEQ ID NO: 598 - protein, 4 aa, synthetic construct
  REGION 1..4: note = GGGG motif
GGGG

SEQ ID NO: 599 - protein, 25 aa, synthetic construct
  REGION 1..25: note = KRAS Variant
QYRLKKISKEEKTPGCVKIKKCIIM

SEQ ID NO: 600 - protein, 24 aa, synthetic construct
  REGION 1..24: note = KRAS Variant
KHKEKMSKDGKKKKKKSKTKCVIM

SEQ ID NO: 601 - DNA, 15 bp, synthetic construct
  misc_feature 1..15: note = Antisense Oligonucleotide
  source 1..15: mol_type = other DNA
ctggtgacgagggtt

SEQ ID NO: 602 - DNA, 15 bp, synthetic construct
  misc_feature 1..15: note = Antisense Oligonucleotide
  source 1..15: mol_type = other DNA
cgctcacaccgcttg

SEQ ID NO: 603 - DNA, 15 bp, synthetic construct
  misc_feature 1..15: note = Antisense Oligonucleotide
  source 1..15: mol_type = other DNA
aggctagtaacgtac

SEQ ID NO: 604 - DNA, 15 bp, synthetic construct
  misc_feature 1..15: note = Antisense Oligonucleotide
  source 1..15: mol_type = other DNA
gaaggctagtaacgt

SEQ ID NO: 605 - DNA, 15 bp, synthetic construct
  misc_feature 1..15: note = Antisense Oligonucleotide
  source 1..15: mol_type = other DNA
ggttccgtcgggctc

SEQ ID NO: 606 - DNA, 15 bp, synthetic construct
  misc_feature 1..15: note = Antisense Oligonucleotide
  source 1..15: mol_type = other DNA
aggttccgtcgggct

SEQ ID NO: 607 - DNA, 15 bp, synthetic construct
  misc_feature 1..15: note = Antisense Oligonucleotide
  source 1..15: mol_type = other DNA
aaggttccgtcgggc

SEQ ID NO: 608 - DNA, 15 bp, synthetic construct
  misc_feature 1..15: note = Antisense Oligonucleotide
  source 1..15: mol_type = other DNA
aaaggttccgtcggg

SEQ ID NO: 609 - DNA, 15 bp, synthetic construct
  misc_feature 1..15: note = Antisense Oligonucleotide
  source 1..15: mol_type = other DNA
gaaaggttccgtcgg

SEQ ID NO: 610 - DNA, 15 bp, synthetic construct
  misc_feature 1..15: note = Antisense Oligonucleotide
  source 1..15: mol_type = other DNA
agaaaggttccgtcg

SEQ ID NO: 611 - DNA, 15 bp, synthetic construct
  misc_feature 1..15: note = Antisense Oligonucleotide
  source 1..15: mol_type = other DNA
agtcgctgaagcgga

SEQ ID NO: 612 - DNA, 15 bp, synthetic construct
  misc_feature 1..15: note = Antisense Oligonucleotide
  source 1..15: mol_type = other DNA
gagtcgctgaagcgg

SEQ ID NO: 613 - DNA, 15 bp, synthetic construct
  misc_feature 1..15: note = Antisense Oligonucleotide
  source 1..15: mol_type = other DNA
cggattcggtccccc

SEQ ID NO: 614 - DNA, 15 bp, synthetic construct
  misc_feature 1..15: note = Antisense Oligonucleotide
  source 1..15: mol_type = other DNA
ccggattcggtcccc

SEQ ID NO: 615 - DNA, 15 bp, synthetic construct
  misc_feature 1..15: note = Antisense Oligonucleotide
  source 1..15: mol_type = other DNA
cccggattcggtccc

SEQ ID NO: 616 - DNA, 15 bp, synthetic construct
  misc_feature 1..15: note = Antisense Oligonucleotide
  source 1..15: mol_type = other DNA
tcccggattcggtcc

SEQ ID NO: 617 - DNA, 15 bp, synthetic construct
  misc_feature 1..15: note = Antisense Oligonucleotide
  source 1..15: mol_type = other DNA
gatcccggattcggt

SEQ ID NO: 618 - DNA, 15 bp, synthetic construct
  misc_feature 1..15: note = Antisense Oligonucleotide
  source 1..15: mol_type = other DNA
agatcccggattcgg

SEQ ID NO: 619 - DNA, 15 bp, synthetic construct
  misc_feature 1..15: note = Antisense Oligonucleotide
  source 1..15: mol_type = other DNA
aagatcccggattcg

SEQ ID NO: 620 - DNA, 15 bp, synthetic construct
  misc_feature 1..15: note = Antisense Oligonucleotide
  source 1..15: mol_type = other DNA
tgatacggggggatg

SEQ ID NO: 621 - DNA, 15 bp, synthetic construct
  misc_feature 1..15: note = Antisense Oligonucleotide
  source 1..15: mol_type = other DNA
cgtgtgcgcgctgca

SEQ ID NO: 622 - DNA, 16 bp, synthetic construct
  misc_feature 1..16: note = Antisense Oligonucleotide
  source 1..16: mol_type = other DNA
actggtgacgagggtt

SEQ ID NO: 623 - DNA, 16 bp, synthetic construct
  misc_feature 1..16: note = Antisense Oligonucleotide
  source 1..16: mol_type = other DNA
aactggtgacgagggt

SEQ ID NO: 624 - DNA, 16 bp, synthetic construct
  misc_feature 1..16: note = Antisense Oligonucleotide
  source 1..16: mol_type = other DNA
ctcacaccgcttgatc

SEQ ID NO: 625 - DNA, 16 bp, synthetic construct
  misc_feature 1..16: note = Antisense Oligonucleotide
  source 1..16: mol_type = other DNA
cggtcagaccagtagc

SEQ ID NO: 626 - DNA, 16 bp, synthetic construct
  misc_feature 1..16: note = Antisense Oligonucleotide
  source 1..16: mol_type = other DNA
ctagtaacgtactgtt

SEQ ID NO: 627 - DNA, 16 bp, synthetic construct
  misc_feature 1..16: note = Antisense Oligonucleotide
  source 1..16: mol_type = other DNA
gctagtaacgtactgt

SEQ ID NO: 628 - DNA, 16 bp, synthetic construct
  misc_feature 1..16: note = Antisense Oligonucleotide
  source 1..16: mol_type = other DNA
ggctagtaacgtactg

SEQ ID NO: 629 - DNA, 16 bp, synthetic construct
  misc_feature 1..16: note = Antisense Oligonucleotide
  source 1..16: mol_type = other DNA
aggctagtaacgtact

SEQ ID NO: 630 - DNA, 16 bp, synthetic construct
  misc_feature 1..16: note = Antisense Oligonucleotide
  source 1..16: mol_type = other DNA
aaggctagtaacgtac

SEQ ID NO: 631 - DNA, 16 bp, synthetic construct
  misc_feature 1..16: note = Antisense Oligonucleotide
  source 1..16: mol_type = other DNA
aagaaggctagtaacg

SEQ ID NO: 632 - DNA, 16 bp, synthetic construct
  misc_feature 1..16: note = Antisense Oligonucleotide
  source 1..16: mol_type = other DNA
aaaggttccgtcgggc

SEQ ID NO: 633 - DNA, 16 bp, synthetic construct
  misc_feature 1..16: note = Antisense Oligonucleotide
  source 1..16: mol_type = other DNA
agaaaggttccgtcgg

SEQ ID NO: 634 - DNA, 16 bp, synthetic construct
  misc_feature 1..16: note = Antisense Oligonucleotide
  source 1..16: mol_type = other DNA
ttcggtcccccagtga

SEQ ID NO: 635 - DNA, 16 bp, synthetic construct
  misc_feature 1..16: note = Antisense Oligonucleotide
  source 1..16: mol_type = other DNA
cggattcggtccccca

SEQ ID NO: 636 - DNA, 16 bp, synthetic construct
  misc_feature 1..16: note = Antisense Oligonucleotide
  source 1..16: mol_type = other DNA
agatcccggattcggt

SEQ ID NO: 637 - DNA, 16 bp, synthetic construct
  misc_feature 1..16: note = Antisense Oligonucleotide
  source 1..16: mol_type = other DNA
agcaagatcccggatt

SEQ ID NO: 638 - DNA, 16 bp, synthetic construct
  misc_feature 1..16: note = Antisense Oligonucleotide
  source 1..16: mol_type = other DNA
tgatacggggggatgg

SEQ ID NO: 639 - DNA, 16 bp, synthetic construct
  misc_feature 1..16: note = Antisense Oligonucleotide
  source 1..16: mol_type = other DNA
ttgatacggggggatg

SEQ ID NO: 640 - DNA, 16 bp, synthetic construct
  misc_feature 1..16: note = Antisense Oligonucleotide
  source 1..16: mol_type = other DNA
agaggccttgatacgg

SEQ ID NO: 641 - DNA, 16 bp, synthetic construct
  misc_feature 1..16: note = Antisense Oligonucleotide
  source 1..16: mol_type = other DNA
gggttagcatatgtca

SEQ ID NO: 642 - DNA, 17 bp, synthetic construct
  misc_feature 1..17: note = Antisense Oligonucleotide
  source 1..17: mol_type = other DNA
tggatctcccctactcg

SEQ ID NO: 643 - DNA, 17 bp, synthetic construct
  misc_feature 1..17: note = Antisense Oligonucleotide
  source 1..17: mol_type = other DNA
actggtgacgagggttc

SEQ ID NO: 644 - DNA, 17 bp, synthetic construct
  misc_feature 1..17: note = Antisense Oligonucleotide
  source 1..17: mol_type = other DNA
gctcacaccgcttgatc

SEQ ID NO: 645 - DNA, 17 bp, synthetic construct
  misc_feature 1..17: note = Antisense Oligonucleotide
  source 1..17: mol_type = other DNA
cgctcacaccgcttgat

SEQ ID NO: 646 - DNA, 17 bp, synthetic construct
  misc_feature 1..17: note = Antisense Oligonucleotide
  source 1..17: mol_type = other DNA
tccgctcacaccgcttg

SEQ ID NO: 647 - DNA, 17 bp, synthetic construct
  misc_feature 1..17: note = Antisense Oligonucleotide
  source 1..17: mol_type = other DNA
ttccgctcacaccgctt

SEQ ID NO: 648 - DNA, 17 bp, synthetic construct
  misc_feature 1..17: note = Antisense Oligonucleotide
  source 1..17: mol_type = other DNA
accagtagctccggaga

SEQ ID NO: 649 - DNA, 17 bp, synthetic construct
  misc_feature 1..17: note = Antisense Oligonucleotide
  source 1..17: mol_type = other DNA
gccggtcagaccagtag

SEQ ID NO: 650 - DNA, 17 bp, synthetic construct
  misc_feature 1..17: note = Antisense Oligonucleotide
  source 1..17: mol_type = other DNA
agccggtcagaccagta

SEQ ID NO: 651 - DNA, 17 bp, synthetic construct
  misc_feature 1..17: note = Antisense Oligonucleotide
  source 1..17: mol_type = other DNA
agaaggctagtaacgta

SEQ ID NO: 652 - DNA, 17 bp, synthetic construct
  misc_feature 1..17: note = Antisense Oligonucleotide
  source 1..17: mol_type = other DNA
aaggttccgtcgggctc

SEQ ID NO: 653 - DNA, 17 bp, synthetic construct
  misc_feature 1..17: note = Antisense Oligonucleotide
  source 1..17: mol_type = other DNA
aaaggttccgtcgggct

SEQ ID NO: 654 - DNA, 17 bp, synthetic construct
  misc_feature 1..17: note = Antisense Oligonucleotide
  source 1..17: mol_type = other DNA
gaaaggttccgtcgggc

SEQ ID NO: 655 - DNA, 17 bp, synthetic construct
  misc_feature 1..17: note = Antisense Oligonucleotide
  source 1..17: mol_type = other DNA
ctgagtcgctgaagcgg

SEQ ID NO: 656 - DNA, 17 bp, synthetic construct
  misc_feature 1..17: note = Antisense Oligonucleotide
  source 1..17: mol_type = other DNA
tctgagtcgctgaagcg

SEQ ID NO: 657 - DNA, 17 bp, synthetic construct
  misc_feature 1..17: note = Antisense Oligonucleotide
  source 1..17: mol_type = other DNA
atcccggattcggtccc

SEQ ID NO: 658 - DNA, 17 bp, synthetic construct
  misc_feature 1..17: note = Antisense Oligonucleotide
  source 1..17: mol_type = other DNA
gatcccggattcggtcc

SEQ ID NO: 659 - DNA, 17 bp, synthetic construct
  misc_feature 1..17: note = Antisense Oligonucleotide
  source 1..17: mol_type = other DNA
agatcccggattcggtc

SEQ ID NO: 660 - DNA, 17 bp, synthetic construct
  misc_feature 1..17: note = Antisense Oligonucleotide
  source 1..17: mol_type = other DNA
aagatcccggattcggt

SEQ ID NO: 661 - DNA, 17 bp, synthetic construct
  misc_feature 1..17: note = Antisense Oligonucleotide
  source 1..17: mol_type = other DNA
gcaagatcccggattcg

SEQ ID NO: 662 - DNA, 17 bp, synthetic construct
  misc_feature 1..17: note = Antisense Oligonucleotide
  source 1..17: mol_type = other DNA
cggtcatcttgatggta

SEQ ID NO: 663 - DNA, 17 bp, synthetic construct
  misc_feature 1..17: note = Antisense Oligonucleotide
  source 1..17: mol_type = other DNA
tgatacggggggatgga

SEQ ID NO: 664 - DNA, 17 bp, synthetic construct
  misc_feature 1..17: note = Antisense Oligonucleotide
  source 1..17: mol_type = other DNA
ttgatacggggggatgg

SEQ ID NO: 665 - DNA, 17 bp, synthetic construct
  misc_feature 1..17: note = Antisense Oligonucleotide
  source 1..17: mol_type = other DNA
cttgatacggggggatg

SEQ ID NO: 666 - DNA, 17 bp, synthetic construct
  misc_feature 1..17: note = Antisense Oligonucleotide
  source 1..17: mol_type = other DNA
gaggccttgatacgggg

SEQ ID NO: 667 - DNA, 20 bp, synthetic construct
  misc_feature 1..20: note = Antisense Oligonucleotide
  source 1..20: mol_type = other DNA
gggggtccctctgatatatg

SEQ ID NO: 668 - DNA, 20 bp, synthetic construct
  misc_feature 1..20: note = Antisense Oligonucleotide
  source 1..20: mol_type = other DNA
gtggatctcccctactcggt

SEQ ID NO: 669 - DNA, 20 bp, synthetic construct
  misc_feature 1..20: note = Antisense Oligonucleotide
  source 1..20: mol_type = other DNA
agcccaacaggaatcgaact

SEQ ID NO: 670 - DNA, 20 bp, synthetic construct
  misc_feature 1..20: note = Antisense Oligonucleotide
  source 1..20: mol_type = other DNA
cgctcacaccgcttgatctt

SEQ ID NO: 671 - DNA, 20 bp, synthetic construct
  misc_feature 1..20: note = Antisense Oligonucleotide
  source 1..20: mol_type = other DNA
ccgctcacaccgcttgatct

SEQ ID NO: 672 - DNA, 20 bp, synthetic construct
  misc_feature 1..20: note = Antisense Oligonucleotide
  source 1..20: mol_type = other DNA
tccgctcacaccgcttgatc

SEQ ID NO: 673 - DNA, 20 bp, synthetic construct
  misc_feature 1..20: note = Antisense Oligonucleotide
  source 1..20: mol_type = other DNA
agtttgccggggccaagtgt

SEQ ID NO: 674 - DNA, 20 bp, synthetic construct
  misc_feature 1..20: note = Antisense Oligonucleotide
  source 1..20: mol_type = other DNA
aagggcacgcggtccatctc

SEQ ID NO: 675 - DNA, 20 bp, synthetic construct
  misc_feature 1..20: note = Antisense Oligonucleotide
  source 1..20: mol_type = other DNA
aaagggcacgcggtccatct

SEQ ID NO: 676 - DNA, 20 bp, synthetic construct
  misc_feature 1..20: note = Antisense Oligonucleotide
  source 1..20: mol_type = other DNA
caaagggcacgcggtccatc

SEQ ID NO: 677 - DNA, 20 bp, synthetic construct
  misc_feature 1..20: note = Antisense Oligonucleotide
  source 1..20: mol_type = other DNA
acaaagggcacgcggtccat

SEQ ID NO: 678 - DNA, 20 bp, synthetic construct
  misc_feature 1..20: note = Antisense Oligonucleotide
  source 1..20: mol_type = other DNA
ccggagacagcgtttggtga

SEQ ID NO: 679 - DNA, 20 bp, synthetic construct
  misc_feature 1..20: note = Antisense Oligonucleotide
  source 1..20: mol_type = other DNA
tccggagacagcgtttggtg

SEQ ID NO: 680 - DNA, 20 bp, synthetic construct
  misc_feature 1..20: note = Antisense Oligonucleotide
  source 1..20: mol_type = other DNA
agtagctccggagacagcgt

SEQ ID NO: 681 - DNA, 20 bp, synthetic construct
  misc_feature 1..20: note = Antisense Oligonucleotide
  source 1..20: mol_type = other DNA
cggtcagaccagtagctccg

SEQ ID NO: 682 - DNA, 20 bp, synthetic construct
  misc_feature 1..20: note = Antisense Oligonucleotide
  source 1..20: mol_type = other DNA
agccggtcagaccagtagct

SEQ ID NO: 683 - DNA, 20 bp, synthetic construct
  misc_feature 1..20: note = Antisense Oligonucleotide
  source 1..20: mol_type = other DNA
cagccggtcagaccagtagc

SEQ ID NO: 684 - DNA, 20 bp, synthetic construct
  misc_feature 1..20: note = Antisense Oligonucleotide
  source 1..20: mol_type = other DNA
gctagtaacgtactgtttgc

SEQ ID NO: 685 - DNA, 20 bp, synthetic construct
  misc_feature 1..20: note = Antisense Oligonucleotide
  source 1..20: mol_type = other DNA
aagaaggctagtaacgtact

SEQ ID NO: 686 - DNA, 20 bp, synthetic construct
  misc_feature 1..20: note = Antisense Oligonucleotide
  source 1..20: mol_type = other DNA
gaagaaggctagtaacgtac

SEQ ID NO: 687 - DNA, 20 bp, synthetic construct
  misc_feature 1..20: note = Antisense Oligonucleotide
  source 1..20: mol_type = other DNA
agaagaaggctagtaacgta

SEQ ID NO: 688 - DNA, 20 bp, synthetic construct
  misc_feature 1..20: note = Antisense Oligonucleotide
  source 1..20: mol_type = other DNA
gagaaaggttccgtcgggct

SEQ ID NO: 689 - DNA, 20 bp, synthetic construct
  misc_feature 1..20: note = Antisense Oligonucleotide
  source 1..20: mol_type = other DNA
ggagaaaggttccgtcgggc

SEQ ID NO: 690 - DNA, 20 bp, synthetic construct
  misc_feature 1..20: note = Antisense Oligonucleotide
  source 1..20: mol_type = other DNA
cggattcggtcccccagtga

SEQ ID NO: 691 - DNA, 20 bp, synthetic construct
  misc_feature 1..20: note = Antisense Oligonucleotide
  source 1..20: mol_type = other DNA
ccggattcggtcccccagtg

SEQ ID NO: 692 - DNA, 20 bp, synthetic construct
  misc_feature 1..20: note = Antisense Oligonucleotide
  source 1..20: mol_type = other DNA
atcccggattcggtccccca

SEQ ID NO: 693 - DNA, 20 bp, synthetic construct
  misc_feature 1..20: note = Antisense Oligonucleotide
  source 1..20: mol_type = other DNA
agatcccggattcggtcccc

SEQ ID NO: 694 - DNA, 20 bp, synthetic construct
  misc_feature 1..20: note = Antisense Oligonucleotide
  source 1..20: mol_type = other DNA
aagatcccggattcggtccc

SEQ ID NO: 695 - DNA, 20 bp, synthetic construct
  misc_feature 1..20: note = Antisense Oligonucleotide
  source 1..20: mol_type = other DNA
gcaagatcccggattcggtc

SEQ ID NO: 696 - DNA, 20 bp, synthetic construct
  misc_feature 1..20: note = Antisense Oligonucleotide
  source 1..20: mol_type = other DNA
tgagcaagatcccggattcg

SEQ ID NO: 697 - DNA, 20 bp, synthetic construct
  misc_feature 1..20: note = Antisense Oligonucleotide
  source 1..20: mol_type = other DNA
tgatacggggggatggagtg

SEQ ID NO: 698 - DNA, 20 bp, synthetic construct
  misc_feature 1..20: note = Antisense Oligonucleotide
  source 1..20: mol_type = other DNA
ttgatacggggggatggagt

SEQ ID NO: 699 - DNA, 20 bp, synthetic construct
  misc_feature 1..20: note = Antisense Oligonucleotide
  source 1..20: mol_type = other DNA
gggagaggccttgatacggg

SEQ ID NO: 700 - DNA, 20 bp, synthetic construct
  misc_feature 1..20: note = Antisense Oligonucleotide
  source 1..20: mol_type = other DNA
gatcaccaactggggttggc

SEQ ID NO: 701 - DNA, 20 bp, synthetic construct
  misc_feature 1..20: note = Antisense Oligonucleotide
  source 1..20: mol_type = other DNA
tgcgtgtgcgcgctgcaggt

SEQ ID NO: 702 - DNA, 20 bp, synthetic construct
  misc_feature 1..20: note = Antisense Oligonucleotide
  source 1..20: mol_type = other DNA
gtgcgtgtgcgcgctgcagg

SEQ ID NO: 703 - DNA, 20 bp, synthetic construct
  misc_feature 1..20: note = Antisense Oligonucleotide
  source 1..20: mol_type = other DNA
gcccttgtacttttgcatag

SEQ ID NO: 704 - DNA, 15 bp, synthetic construct
  misc_feature 1..15: note = Antisense Oligonucleotide
  source 1..15: mol_type = other DNA
agtccgcctcgtagt

SEQ ID NO: 705 - DNA, 15 bp, synthetic construct
  misc_feature 1..15: note = Antisense Oligonucleotide
  source 1..15: mol_type = other DNA
ttgccgccgtacgca

SEQ ID NO: 706 - DNA, 15 bp, synthetic construct
  misc_feature 1..15: note = Antisense Oligonucleotide
  source 1..15: mol_type = other DNA
cgccttgccgccgta

SEQ ID NO: 707 - DNA, 15 bp, synthetic construct
  misc_feature 1..15: note = Antisense Oligonucleotide
  source 1..15: mol_type = other DNA
gctcgtggtcgccga

SEQ ID NO: 708 - DNA, 15 bp, synthetic construct
  misc_feature 1..15: note = Antisense Oligonucleotide
  source 1..15: mol_type = other DNA
cgtagtcgtcggaga

SEQ ID NO: 709 - DNA, 15 bp, synthetic construct
  misc_feature 1..15: note = Antisense Oligonucleotide
  source 1..15: mol_type = other DNA
ccgtagtcgtcggag

SEQ ID NO: 710 - DNA, 15 bp, synthetic construct
  misc_feature 1..15: note = Antisense Oligonucleotide
  source 1..15: mol_type = other DNA
cccgtagtcgtcgga

SEQ ID NO: 711 - DNA, 15 bp, synthetic construct
  misc_feature 1..15: note = Antisense Oligonucleotide
  source 1..15: mol_type = other DNA
ccccgtagtcgtcgg

SEQ ID NO: 712 - DNA, 15 bp, synthetic construct
  misc_feature 1..15: note = Antisense Oligonucleotide
  source 1..15: mol_type = other DNA
cccccgtagtcgtcg

SEQ ID NO: 713 - DNA, 15 bp, synthetic construct
  misc_feature 1..15: note = Antisense Oligonucleotide
  source 1..15: mol_type = other DNA
gccgtactcggccgg

SEQ ID NO: 714 - DNA, 15 bp, synthetic construct
  misc_feature 1..15: note = Antisense Oligonucleotide
  source 1..15: mol_type = other DNA
tagccgtactcggcc

SEQ ID NO: 715 - DNA, 15 bp, synthetic construct
  misc_feature 1..15: note = Antisense Oligonucleotide
  source 1..15: mol_type = other DNA
acgtagccgtactcg

SEQ ID NO: 716 - DNA, 15 bp, synthetic construct
  misc_feature 1..15: note = Antisense Oligonucleotide
  source 1..15: mol_type = other DNA
tcacgtagccgtact

SEQ ID NO: 717 - DNA, 15 bp, synthetic construct
  misc_feature 1..15: note = Antisense Oligonucleotide
  source 1..15: mol_type = other DNA
agtccgcgggctcga

SEQ ID NO: 718 - DNA, 15 bp, synthetic construct
  misc_feature 1..15: note = Antisense Oligonucleotide
  source 1..15: mol_type = other DNA
gcgcgtacgggaagc

SEQ ID NO: 719 - DNA, 15 bp, synthetic construct
  misc_feature 1..15: note = Antisense Oligonucleotide
  source 1..15: mol_type = other DNA
agcgcgcagcgcgta

SEQ ID NO: 720 - DNA, 15 bp, synthetic construct
  misc_feature 1..15: note = Antisense Oligonucleotide
  source 1..15: mol_type = other DNA
aagcgcgcagcgcgt

SEQ ID NO: 721 - DNA, 15 bp, synthetic construct
  misc_feature 1..15: note = Antisense Oligonucleotide
  source 1..15: mol_type = other DNA
taagcgcgcagcgcg

SEQ ID NO: 722 - DNA, 15 bp, synthetic construct
  misc_feature 1..15: note = Antisense Oligonucleotide
  source 1..15: mol_type = other DNA
cgaggtaagcgcgca

SEQ ID NO: 723 - DNA, 15 bp, synthetic construct
  misc_feature 1..15: note = Antisense Oligonucleotide
  source 1..15: mol_type = other DNA
cgccggatcttgtac

SEQ ID NO: 724 - DNA, 15 bp, synthetic construct
  misc_feature 1..15: note = Antisense Oligonucleotide
  source 1..15: mol_type = other DNA
tcgcgccggatcttg

SEQ ID NO: 725 - DNA, 15 bp, synthetic construct
  misc_feature 1..15: note = Antisense Oligonucleotide
  source 1..15: mol_type = other DNA
ctcgcgccggatctt

SEQ ID NO: 726 - DNA, 15 bp, synthetic construct
  misc_feature 1..15: note = Antisense Oligonucleotide
  source 1..15: mol_type = other DNA
tcgcgcgacagctgc

SEQ ID NO: 727 - DNA, 15 bp, synthetic construct
  misc_feature 1..15: note = Antisense Oligonucleotide
  source 1..15: mol_type = other DNA
gctcgcgcgacagct

SEQ ID NO: 728 - DNA, 16 bp, synthetic construct
  misc_feature 1..16: note = Antisense Oligonucleotide
  source 1..16: mol_type = other DNA
agtccgcctcgtagta

SEQ ID NO: 729 - DNA, 16 bp, synthetic construct
  misc_feature 1..16: note = Antisense Oligonucleotide
  source 1..16: mol_type = other DNA
cagtccgcctcgtagt

SEQ ID NO: 730 - DNA, 16 bp, synthetic construct
  misc_feature 1..16: note = Antisense Oligonucleotide
  source 1..16: mol_type = other DNA
tgccgccgtacgcagc

SEQ ID NO: 731 - DNA, 16 bp, synthetic construct
  misc_feature 1..16: note = Antisense Oligonucleotide
  source 1..16: mol_type = other DNA
ttgccgccgtacgcag

SEQ ID NO: 732 - DNA, 16 bp, synthetic construct
  misc_feature 1..16: note = Antisense Oligonucleotide
  source 1..16: mol_type = other DNA
cttgccgccgtacgca

SEQ ID NO: 733 - DNA, 16 bp, synthetic construct
  misc_feature 1..16: note = Antisense Oligonucleotide
  source 1..16: mol_type = other DNA
cgccttgccgccgtac

SEQ ID NO: 734 - DNA, 16 bp, synthetic construct
  misc_feature 1..16: note = Antisense Oligonucleotide
  source 1..16: mol_type = other DNA
cgtggtcgccgatgct

SEQ ID NO: 735 - DNA, 16 bp, synthetic construct
  misc_feature 1..16: note = Antisense Oligonucleotide
  source 1..16: mol_type = other DNA
tcgtggtcgccgatgc

SEQ ID NO: 736 - DNA, 16 bp, synthetic construct
  misc_feature 1..16: note = Antisense Oligonucleotide
  source 1..16: mol_type = other DNA
cgctcgtggtcgccga

SEQ ID NO: 737 - DNA, 16 bp, synthetic construct
  misc_feature 1..16: note = Antisense Oligonucleotide
  source 1..16: mol_type = other DNA
cccccgtagtcgtcgg

SEQ ID NO: 738 - DNA, 16 bp, synthetic construct
  misc_feature 1..16: note = Antisense Oligonucleotide
  source 1..16: mol_type = other DNA
acgtagccgtactcgg

SEQ ID NO: 739 - DNA, 16 bp, synthetic construct
  misc_feature 1..16: note = Antisense Oligonucleotide
  source 1..16: mol_type = other DNA
ggctcacgtagccgta

SEQ ID NO: 740 - DNA, 16 bp, synthetic construct
  misc_feature 1..16: note = Antisense Oligonucleotide
  source 1..16: mol_type = other DNA
agtccgcgggctcgaa

SEQ ID NO: 741 - DNA, 16 bp, synthetic construct
  misc_feature 1..16: note = Antisense Oligonucleotide
  source 1..16: mol_type = other DNA
cagtccgcgggctcga

SEQ ID NO: 742 - DNA, 16 bp, synthetic construct
  misc_feature 1..16: note = Antisense Oligonucleotide
  source 1..16: mol_type = other DNA
ttccgcttgcagtccg

SEQ ID NO: 743 - DNA, 16 bp, synthetic construct
  misc_feature 1..16: note = Antisense Oligonucleotide
  source 1..16: mol_type = other DNA
acgggaagcccgccgc

SEQ ID NO: 744 - DNA, 16 bp, synthetic construct
  misc_feature 1..16: note = Antisense Oligonucleotide
  source 1..16: mol_type = other DNA
tacgggaagcccgccg

SEQ ID NO: 745 - DNA, 16 bp, synthetic construct
  misc_feature 1..16: note = Antisense Oligonucleotide
  source 1..16: mol_type = other DNA
aagcgcgcagcgcgta

SEQ ID NO: 746 - DNA, 16 bp, synthetic construct
  misc_feature 1..16: note = Antisense Oligonucleotide
  source 1..16: mol_type = other DNA
taagcgcgcagcgcgt

SEQ ID NO: 747 - DNA, 16 bp, synthetic construct
  misc_feature 1..16: note = Antisense Oligonucleotide
  source 1..16: mol_type = other DNA
gtaagcgcgcagcgcg

SEQ ID NO: 748 - DNA, 16 bp, synthetic construct
  misc_feature 1..16: note = Antisense Oligonucleotide
  source 1..16: mol_type = other DNA
accgcctggtagccga

SEQ ID NO: 749 - DNA, 16 bp, synthetic construct
  misc_feature 1..16: note = Antisense Oligonucleotide
  source 1..16: mol_type = other DNA
tcggcaccgcctggta

SEQ ID NO: 750 - DNA, 16 bp, synthetic construct
  misc_feature 1..16: note = Antisense Oligonucleotide
  source 1..16: mol_type = other DNA
cgtcgctgtgcttgtc

SEQ ID NO: 751 - DNA, 16 bp, synthetic construct
  misc_feature 1..16: note = Antisense Oligonucleotide
  source 1..16: mol_type = other DNA
cgccggatcttgtact

SEQ ID NO: 752 - DNA, 16 bp, synthetic construct
  misc_feature 1..16: note = Antisense Oligonucleotide
  source 1..16: mol_type = other DNA
tcgcgccggatcttgt

SEQ ID NO: 753 - DNA, 16 bp, synthetic construct
  misc_feature 1..16: note = Antisense Oligonucleotide
  source 1..16: mol_type = other DNA
gctcgcgccggatctt

SEQ ID NO: 754 - DNA, 17 bp, synthetic construct
  misc_feature 1..17: note = Antisense Oligonucleotide
  source 1..17: mol_type = other DNA
cagtccgcctcgtagta

SEQ ID NO: 755 - DNA, 17 bp, synthetic construct
  misc_feature 1..17: note = Antisense Oligonucleotide
  source 1..17: mol_type = other DNA
cttgccgccgtacgcag

SEQ ID NO: 756 - DNA, 17 bp, synthetic construct
  misc_feature 1..17: note = Antisense Oligonucleotide
  source 1..17: mol_type = other DNA
ccttgccgccgtacgca

SEQ ID NO: 757 - DNA, 17 bp, synthetic construct
  misc_feature 1..17: note = Antisense Oligonucleotide
  source 1..17: mol_type = other DNA
cgccttgccgccgtacg

SEQ ID NO: 758 - DNA, 17 bp, synthetic construct
  misc_feature 1..17: note = Antisense Oligonucleotide
  source 1..17: mol_type = other DNA
cgctcgtggtcgccgat

SEQ ID NO: 759 - DNA, 17 bp, synthetic construct
  misc_feature 1..17: note = Antisense Oligonucleotide
  source 1..17: mol_type = other DNA
gcgctcgtggtcgccga

SEQ ID NO: 760 - DNA, 17 bp, synthetic construct
  misc_feature 1..17: note = Antisense Oligonucleotide
  source 1..17: mol_type = other DNA
ccgtagtcgtcggagaa

SEQ ID NO: 761 - DNA, 17 bp, synthetic construct
  misc_feature 1..17: note = Antisense Oligonucleotide
  source 1..17: mol_type = other DNA
cccccgtagtcgtcgga

SEQ ID NO: 762 - DNA, 17 bp, synthetic construct
  misc_feature 1..17: note = Antisense Oligonucleotide
  source 1..17: mol_type = other DNA
tgcccccgtagtcgtcg

SEQ ID NO: 763 - DNA, 17 bp, synthetic construct
  misc_feature 1..17: note = Antisense Oligonucleotide
  source 1..17: mol_type = other DNA
acgtagccgtactcggc

SEQ ID NO: 764 - DNA, 17 bp, synthetic construct
  misc_feature 1..17: note = Antisense Oligonucleotide
  source 1..17: mol_type = other DNA
cacgtagccgtactcgg

SEQ ID NO: 765 - DNA, 17 bp, synthetic construct
  misc_feature 1..17: note = Antisense Oligonucleotide
  source 1..17: mol_type = other DNA
ggctcacgtagccgtac

SEQ ID NO: 766 - DNA, 17 bp, synthetic construct
  misc_feature 1..17: note = Antisense Oligonucleotide
  source 1..17: mol_type = other DNA
gtacgggaagcccgccg

SEQ ID NO: 767 - DNA, 17 bp, synthetic construct
  misc_feature 1..17: note = Antisense Oligonucleotide
  source 1..17: mol_type = other DNA
cgcgtacgggaagcccg

SEQ ID NO: 768 - DNA, 17 bp, synthetic construct
  misc_feature 1..17: note = Antisense Oligonucleotide
  source 1..17: mol_type = other DNA
agcgcgcagcgcgtacg

SEQ ID NO: 769 - DNA, 17 bp, synthetic construct
  misc_feature 1..17: note = Antisense Oligonucleotide
  source 1..17: mol_type = other DNA
aagcgcgcagcgcgtac

SEQ ID NO: 770 - DNA, 17 bp, synthetic construct
  misc_feature 1..17: note = Antisense Oligonucleotide
  source 1..17: mol_type = other DNA
taagcgcgcagcgcgta

SEQ ID NO: 771 - DNA, 17 bp, synthetic construct
  misc_feature 1..17: note = Antisense Oligonucleotide
  source 1..17: mol_type = other DNA
gtaagcgcgcagcgcgt

SEQ ID NO: 772 - DNA, 17 bp, synthetic construct
  misc_feature 1..17: note = Antisense Oligonucleotide
  source 1..17: mol_type = other DNA
cggatcttgtactcgtc

SEQ ID NO: 773 - DNA, 17 bp, synthetic construct
  misc_feature 1..17: note = Antisense Oligonucleotide
  source 1..17: mol_type = other DNA
cgcgccggatcttgtac

SEQ ID NO: 774 - DNA, 17 bp, synthetic construct
  misc_feature 1..17: note = Antisense Oligonucleotide
  source 1..17: mol_type = other DNA
tcgcgccggatcttgta

SEQ ID NO: 775 - DNA, 17 bp, synthetic construct
  misc_feature 1..17: note = Antisense Oligonucleotide
  source 1..17: mol_type = other DNA
ctcgcgccggatcttgt

SEQ ID NO: 776 - DNA, 17 bp, synthetic construct
  misc_feature 1..17: note = Antisense Oligonucleotide
  source 1..17: mol_type = other DNA
cgctcgcgccggatctt

SEQ ID NO: 777 - DNA, 17 bp, synthetic construct
  misc_feature 1..17: note = Antisense Oligonucleotide
  source 1..17: mol_type = other DNA
ttgcgctcgcgccggat

SEQ ID NO: 778 - DNA, 20 bp, synthetic construct
  misc_feature 1..20: note = Antisense Oligonucleotide
  source 1..20: mol_type = other DNA
cgccttgccgccgtacgcag

SEQ ID NO: 779 - DNA, 20 bp, synthetic construct
  misc_feature 1..20: note = Antisense Oligonucleotide
  source 1..20: mol_type = other DNA
ccgccttgccgccgtacgca

SEQ ID NO: 780 - DNA, 20 bp, synthetic construct
  misc_feature 1..20: note = Antisense Oligonucleotide
  source 1..20: mol_type = other DNA
ttgcccccgtagtcgtcgga

SEQ ID NO: 781 - DNA, 20 bp, synthetic construct
  misc_feature 1..20: note = Antisense Oligonucleotide
  source 1..20: mol_type = other DNA
taagcgcgcagcgcgtacgg

SEQ ID NO: 782 - DNA, 20 bp, synthetic construct
  misc_feature 1..20: note = Antisense Oligonucleotide
  source 1..20: mol_type = other DNA
gtaagcgcgcagcgcgtacg

SEQ ID NO: 783 - DNA, 20 bp, synthetic construct
  misc_feature 1..20: note = Antisense Oligonucleotide
  source 1..20: mol_type = other DNA
aggtaagcgcgcagcgcgta

SEQ ID NO: 784 - DNA, 20 bp, synthetic construct
  misc_feature 1..20: note = Antisense Oligonucleotide
  source 1..20: mol_type = other DNA
cgcgccggatcttgtactcg

SEQ ID NO: 785 - DNA, 20 bp, synthetic construct
  misc_feature 1..20: note = Antisense Oligonucleotide
  source 1..20: mol_type = other DNA
gcgctcgcgccggatcttgt

SEQ ID NO: 786 - DNA, 20 bp, synthetic construct
  misc_feature 1..20: note = Antisense Oligonucleotide
  source 1..20: mol_type = other DNA
gcgctcgtggtcgccgatgc

SEQ ID NO: 787 - DNA, 20 bp, synthetic construct
  misc_feature 1..20: note = Antisense Oligonucleotide
  source 1..20: mol_type = other DNA
tagccgtactcggccggctt

SEQ ID NO: 788 - DNA, 20 bp, synthetic construct
  misc_feature 1..20: note = Antisense Oligonucleotide
  source 1..20: mol_type = other DNA
gtagccgtactcggccggct

SEQ ID NO: 789 - DNA, 20 bp, synthetic construct
  misc_feature 1..20: note = Antisense Oligonucleotide
  source 1..20: mol_type = other DNA
cgtagccgtactcggccggc

SEQ ID NO: 790 - DNA, 20 bp, synthetic construct
  misc_feature 1..20: note = Antisense Oligonucleotide
  source 1..20: mol_type = other DNA
ggtaagcgcgcagcgcgtac

SEQ ID NO: 791 - DNA, 20 bp, synthetic construct
  misc_feature 1..20: note = Antisense Oligonucleotide
  source 1..20: mol_type = other DNA
tagccgaggtaagcgcgcag

SEQ ID NO: 792 - DNA, 20 bp, synthetic construct
  misc_feature 1..20: note = Antisense Oligonucleotide
  source 1..20: mol_type = other DNA
gtagccgaggtaagcgcgca

SEQ ID NO: 793 - DNA, 20 bp, synthetic construct
  misc_feature 1..20: note = Antisense Oligonucleotide
  source 1..20: mol_type = other DNA
cggatcttgtactcgtcgct

SEQ ID NO: 794 - DNA, 20 bp, synthetic construct
  misc_feature 1..20: note = Antisense Oligonucleotide
  source 1..20: mol_type = other DNA
ttgcgctcgcgccggatctt

SEQ ID NO: 795 - DNA, 20 bp, synthetic construct
  misc_feature 1..20: note = Antisense Oligonucleotide
  source 1..20: mol_type = other DNA
gttgcgctcgcgccggatct

SEQ ID NO: 796 - DNA, 20 bp, synthetic construct
  misc_feature 1..20: note = Antisense Oligonucleotide
  source 1..20: mol_type = other DNA
cgctcgtggtcgccgatgct

SEQ ID NO: 797 - DNA, 20 bp, synthetic construct
  misc_feature 1..20: note = Antisense Oligonucleotide
  source 1..20: mol_type = other DNA
gcgcgctcgtggtcgccgat

SEQ ID NO: 798 - DNA, 20 bp, synthetic construct
  misc_feature 1..20: note = Antisense Oligonucleotide
  source 1..20: mol_type = other DNA
acgtagccgtactcggccgg

SEQ ID NO: 799 - DNA, 20 bp, synthetic construct
  misc_feature 1..20: note = Antisense Oligonucleotide
  source 1..20: mol_type = other DNA
gcgccggatcttgtactcgt

SEQ ID NO: 800 - DNA, 20 bp, synthetic construct
  misc_feature 1..20: note = Antisense Oligonucleotide
  source 1..20: mol_type = other DNA
tcgcgccggatcttgtactc

SEQ ID NO: 801 - DNA, 20 bp, synthetic construct
  misc_feature 1..20: note = Antisense Oligonucleotide
  source 1..20: mol_type = other DNA
gctcgcgccggatcttgtac

SEQ ID NO: 802 - DNA, 20 bp, synthetic construct
  misc_feature 1..20: note = Antisense Oligonucleotide
  source 1..20: mol_type = other DNA
cgcgctcgtggtcgccgatg

SEQ ID NO: 803 - DNA, 20 bp, synthetic construct
  misc_feature 1..20: note = Antisense Oligonucleotide
  source 1..20: mol_type = other DNA
aagcgcgcagcgcgtacggg

SEQ ID NO: 804 - DNA, 20 bp, synthetic construct
  misc_feature 1..20: note = Antisense Oligonucleotide
  source 1..20: mol_type = other DNA
ccggatcttgtactcgtcgc

SEQ ID NO: 805 - DNA, 20 bp, synthetic construct
  misc_feature 1..20: note = Antisense Oligonucleotide
  source 1..20: mol_type = other DNA
ctcgcgccggatcttgtact

SEQ ID NO: 806 - DNA, 20 bp, synthetic construct
  misc_feature 1..20: note = Antisense Oligonucleotide
  source 1..20: mol_type = other DNA
cgctcgcgccggatcttgta

SEQ ID NO: 807 - DNA, 14 bp, synthetic construct
  misc_feature 1..14: note = Antisense Oligonucleotide
  source 1..14: mol_type = other DNA
tcagctccaactac

SEQ ID NO: 808 - DNA, 14 bp, synthetic construct
  misc_feature 1..14: note = Antisense Oligonucleotide
  source 1..14: mol_type = other DNA
atcagctccaacta

SEQ ID NO: 809 - DNA, 14 bp, synthetic construct
  misc_feature 1..14: note = Antisense Oligonucleotide
  source 1..14: mol_type = other DNA
catcagctccaact

SEQ ID NO: 810 - DNA, 14 bp, synthetic construct
  misc_feature 1..14: note = Antisense Oligonucleotide
  source 1..14: mol_type = other DNA
ccatcagctccaac

SEQ ID NO: 811 - DNA, 14 bp, synthetic construct
  misc_feature 1..14: note = Antisense Oligonucleotide
  source 1..14: mol_type = other DNA
gccatcagctccaa

SEQ ID NO: 812 - DNA, 14 bp, synthetic construct
  misc_feature 1..14: note = Antisense Oligonucleotide
  source 1..14: mol_type = other DNA
cgccatcagctcca

SEQ ID NO: 813 - DNA, 14 bp, synthetic construct
  misc_feature 1..14: note = Antisense Oligonucleotide
  source 1..14: mol_type = other DNA
acgccatcagctcc

SEQ ID NO: 814 - DNA, 14 bp, synthetic construct
  misc_feature 1..14: note = Antisense Oligonucleotide
  source 1..14: mol_type = other DNA
tacgccatcagctc

SEQ ID NO: 815 - DNA, 14 bp, synthetic construct
  misc_feature 1..14: note = Antisense Oligonucleotide
  source 1..14: mol_type = other DNA
ctacgccatcagct

SEQ ID NO: 816 - DNA, 14 bp, synthetic construct
  misc_feature 1..14: note = Antisense Oligonucleotide
  source 1..14: mol_type = other DNA
cctacgccatcagc

SEQ ID NO: 817 - DNA, 14 bp, synthetic construct
  misc_feature 1..14: note = Antisense Oligonucleotide
  source 1..14: mol_type = other DNA
gcctacgccatcag

SEQ ID NO: 818 - DNA, 14 bp, synthetic construct
  misc_feature 1..14: note = Antisense Oligonucleotide
  source 1..14: mol_type = other DNA
tgcctacgccatca

SEQ ID NO: 819 - DNA, 14 bp, synthetic construct
  misc_feature 1..14: note = Antisense Oligonucleotide
  source 1..14: mol_type = other DNA
ttgcctacgccatc

SEQ ID NO: 820 - DNA, 14 bp, synthetic construct
  misc_feature 1..14: note = Antisense Oligonucleotide
  source 1..14: mol_type = other DNA
cttgcctacgccat

SEQ ID NO: 821 - DNA, 15 bp, synthetic construct
  misc_feature 1..15: note = Antisense Oligonucleotide
  source 1..15: mol_type = other DNA
tcagctccaactacc

SEQ ID NO: 822 - DNA, 15 bp, synthetic construct
  misc_feature 1..15: note = Antisense Oligonucleotide
  source 1..15: mol_type = other DNA
atcagctccaactac

SEQ ID NO: 823 - DNA, 15 bp, synthetic construct
  misc_feature 1..15: note = Antisense Oligonucleotide
  source 1..15: mol_type = other DNA
catcagctccaacta

SEQ ID NO: 824 - DNA, 15 bp, synthetic construct
  misc_feature 1..15: note = Antisense Oligonucleotide
  source 1..15: mol_type = other DNA
ccatcagctccaact

SEQ ID NO: 825 - DNA, 15 bp, synthetic construct
  misc_feature 1..15: note = Antisense Oligonucleotide
  source 1..15: mol_type = other DNA
gccatcagctccaac

SEQ ID NO: 826 - DNA, 15 bp, synthetic construct
  misc_feature 1..15: note = Antisense Oligonucleotide
  source 1..15: mol_type = other DNA
cgccatcagctccaa

SEQ ID NO: 827 - DNA, 15 bp, synthetic construct
  misc_feature 1..15: note = Antisense Oligonucleotide
  source 1..15: mol_type = other DNA
acgccatcagctcca

SEQ ID NO: 828 - DNA, 15 bp, synthetic construct
  misc_feature 1..15: note = Antisense Oligonucleotide
  source 1..15: mol_type = other DNA
tacgccatcagctcc

SEQ ID NO: 829 - DNA, 15 bp, synthetic construct
  misc_feature 1..15: note = Antisense Oligonucleotide
  source 1..15: mol_type = other DNA
ctacgccatcagctc

SEQ ID NO: 830 - DNA, 15 bp, synthetic construct
  misc_feature 1..15: note = Antisense Oligonucleotide
  source 1..15: mol_type = other DNA
cctacgccatcagct

SEQ ID NO: 831 - DNA, 15 bp, synthetic construct
  misc_feature 1..15: note = Antisense Oligonucleotide
  source 1..15: mol_type = other DNA
gcctacgccatcagc

SEQ ID NO: 832 - DNA, 15 bp, synthetic construct
  misc_feature 1..15: note = Antisense Oligonucleotide
  source 1..15: mol_type = other DNA
tgcctacgccatcag

SEQ ID NO: 833 - DNA, 15 bp, synthetic construct
  misc_feature 1..15: note = Antisense Oligonucleotide
  source 1..15: mol_type = other DNA
ttgcctacgccatca

SEQ ID NO: 834 - DNA, 15 bp, synthetic construct
  misc_feature 1..15: note = Antisense Oligonucleotide
  source 1..15: mol_type = other DNA
cttgcctacgccatc

SEQ ID NO: 835 - DNA, 15 bp, synthetic construct
  misc_feature 1..15: note = Antisense Oligonucleotide
  source 1..15: mol_type = other DNA
tcttgcctacgccat

SEQ ID NO: 836 - DNA, 16 bp, synthetic construct
  misc_feature 1..16: note = Antisense Oligonucleotide
  source 1..16: mol_type = other DNA
tcagctccaactacca

SEQ ID NO: 837 - DNA, 16 bp, synthetic construct
  misc_feature 1..16: note = Antisense Oligonucleotide
  source 1..16: mol_type = other DNA
atcagctccaactacc

SEQ ID NO: 838 - DNA, 16 bp, synthetic construct
  misc_feature 1..16: note = Antisense Oligonucleotide
  source 1..16: mol_type = other DNA
catcagctccaactac

SEQ ID NO: 839 - DNA, 16 bp, synthetic construct
  misc_feature 1..16: note = Antisense Oligonucleotide
  source 1..16: mol_type = other DNA
ccatcagctccaacta

SEQ ID NO: 840 - DNA, 16 bp, synthetic construct
  misc_feature 1..16: note = Antisense Oligonucleotide
  source 1..16: mol_type = other DNA
gccatcagctccaact

SEQ ID NO: 841 - DNA, 16 bp, synthetic construct
  misc_feature 1..16: note = Antisense Oligonucleotide
  source 1..16: mol_type = other DNA
cgccatcagctccaac

SEQ ID NO: 842 - DNA, 16 bp, synthetic construct
  misc_feature 1..16: note = Antisense Oligonucleotide
  source 1..16: mol_type = other DNA
acgccatcagctccaa

SEQ ID NO: 843 - DNA, 16 bp, synthetic construct
  misc_feature 1..16: note = Antisense Oligonucleotide
  source 1..16: mol_type = other DNA
tacgccatcagctcca

SEQ ID NO: 844 - DNA, 16 bp, synthetic construct
  misc_feature 1..16: note = Antisense Oligonucleotide
  source 1..16: mol_type = other DNA
ctacgccatcagctcc

SEQ ID NO: 845 - DNA, 16 bp, synthetic construct
  misc_feature 1..16: note = Antisense Oligonucleotide
  source 1..16: mol_type = other DNA
cctacgccatcagctc

SEQ ID NO: 846 - DNA, 16 bp, synthetic construct
  misc_feature 1..16: note = Antisense Oligonucleotide
  source 1..16: mol_type = other DNA
gcctacgccatcagct

SEQ ID NO: 847 - DNA, 16 bp, synthetic construct
  misc_feature 1..16: note = Antisense Oligonucleotide
  source 1..16: mol_type = other DNA
tgcctacgccatcagc

SEQ ID NO: 848 - DNA, 16 bp, synthetic construct
  misc_feature 1..16: note = Antisense Oligonucleotide
  source 1..16: mol_type = other DNA
ttgcctacgccatcag

SEQ ID NO: 849 - DNA, 16 bp, synthetic construct
  misc_feature 1..16: note = Antisense Oligonucleotide
  source 1..16: mol_type = other DNA
cttgcctacgccatca

SEQ ID NO: 850 - DNA, 16 bp, synthetic construct
  misc_feature 1..16: note = Antisense Oligonucleotide
  source 1..16: mol_type = other DNA
tcttgcctacgccatc

SEQ ID NO: 851 - DNA, 16 bp, synthetic construct
  misc_feature 1..16: note = Antisense Oligonucleotide
  source 1..16: mol_type = other DNA
ctcttgcctacgccat

SEQ ID NO: 852 - DNA, 17 bp, synthetic construct
  misc_feature 1..17: note = Antisense Oligonucleotide
  source 1..17: mol_type = other DNA
tcagctccaactaccac

SEQ ID NO: 853 - DNA, 17 bp, synthetic construct
  misc_feature 1..17: note = Antisense Oligonucleotide
  source 1..17: mol_type = other DNA
atcagctccaactacca

SEQ ID NO: 854 - DNA, 17 bp, synthetic construct
  misc_feature 1..17: note = Antisense Oligonucleotide
  source 1..17: mol_type = other DNA
catcagctccaactacc

SEQ ID NO: 855 - DNA, 17 bp, synthetic construct
  misc_feature 1..17: note = Antisense Oligonucleotide
  source 1..17: mol_type = other DNA
ccatcagctccaactac

SEQ ID NO: 856 - DNA, 17 bp, synthetic construct
  misc_feature 1..17: note = Antisense Oligonucleotide
  source 1..17: mol_type = other DNA
gccatcagctccaacta

SEQ ID NO: 857 - DNA, 17 bp, synthetic construct
  misc_feature 1..17: note = Antisense Oligonucleotide
  source 1..17: mol_type = other DNA
cgccatcagctccaact

SEQ ID NO: 858 - DNA, 17 bp, synthetic construct
  misc_feature 1..17: note = Antisense Oligonucleotide
  source 1..17: mol_type = other DNA
acgccatcagctccaac

SEQ ID NO: 859 - DNA, 17 bp, synthetic construct
  misc_feature 1..17: note = Antisense Oligonucleotide
  source 1..17: mol_type = other DNA
tacgccatcagctccaa

SEQ ID NO: 860 - DNA, 17 bp, synthetic construct
  misc_feature 1..17: note = Antisense Oligonucleotide
  source 1..17: mol_type = other DNA
ctacgccatcagctcca

SEQ ID NO: 861 - DNA, 17 bp, synthetic construct
  misc_feature 1..17: note = Antisense Oligonucleotide
  source 1..17: mol_type = other DNA
cctacgccatcagctcc

SEQ ID NO: 862 - DNA, 17 bp, synthetic construct
  misc_feature 1..17: note = Antisense Oligonucleotide
  source 1..17: mol_type = other DNA
gcctacgccatcagctc

SEQ ID NO: 863 - DNA, 17 bp, synthetic construct
  misc_feature 1..17: note = Antisense Oligonucleotide
  source 1..17: mol_type = other DNA
tgcctacgccatcagct

SEQ ID NO: 864 - DNA, 17 bp, synthetic construct
  misc_feature 1..17: note = Antisense Oligonucleotide
  source 1..17: mol_type = other DNA
ttgcctacgccatcagc

SEQ ID NO: 865 - DNA, 17 bp, synthetic construct
  misc_feature 1..17: note = Antisense Oligonucleotide
  source 1..17: mol_type = other DNA
cttgcctacgccatcag

SEQ ID NO: 866 - DNA, 17 bp, synthetic construct
  misc_feature 1..17: note = Antisense Oligonucleotide
  source 1..17: mol_type = other DNA
tcttgcctacgccatca

SEQ ID NO: 867 - DNA, 17 bp, synthetic construct
  misc_feature 1..17: note = Antisense Oligonucleotide
  source 1..17: mol_type = other DNA
ctcttgcctacgccatc

SEQ ID NO: 868 - DNA, 17 bp, synthetic construct
  misc_feature 1..17: note = Antisense Oligonucleotide
  source 1..17: mol_type = other DNA
actcttgcctacgccat

SEQ ID NO: 869 - DNA, 20 bp, synthetic construct
  misc_feature 1..20: note = Antisense Oligonucleotide
  source 1..20: mol_type = other DNA
tcagctccaactaccacaag

SEQ ID NO: 870 - DNA, 20 bp, synthetic construct
  misc_feature 1..20: note = Antisense Oligonucleotide
  source 1..20: mol_type = other DNA
atcagctccaactaccacaa

SEQ ID NO: 871 - DNA, 20 bp, synthetic construct
  misc_feature 1..20: note = Antisense Oligonucleotide
  source 1..20: mol_type = other DNA
catcagctccaactaccaca

SEQ ID NO: 872 - DNA, 20 bp, synthetic construct
  misc_feature 1..20: note = Antisense Oligonucleotide
  source 1..20: mol_type = other DNA
ccatcagctccaactaccac

SEQ ID NO: 873 - DNA, 20 bp, synthetic construct
  misc_feature 1..20: note = Antisense Oligonucleotide
  source 1..20: mol_type = other DNA
gccatcagctccaactacca

SEQ ID NO: 874 - DNA, 20 bp, synthetic construct
  misc_feature 1..20: note = Antisense Oligonucleotide
  source 1..20: mol_type = other DNA
cgccatcagctccaactacc

SEQ ID NO: 875 - DNA, 20 bp, synthetic construct
  misc_feature 1..20: note = Antisense Oligonucleotide
  source 1..20: mol_type = other DNA
acgccatcagctccaactac

SEQ ID NO: 876 - DNA, 20 bp, synthetic construct
  misc_feature 1..20: note = Antisense Oligonucleotide
  source 1..20: mol_type = other DNA
tacgccatcagctccaacta

SEQ ID NO: 877 - DNA, 20 bp, synthetic construct
  misc_feature 1..20: note = Antisense Oligonucleotide
  source 1..20: mol_type = other DNA
ctacgccatcagctccaact

SEQ ID NO: 878 - DNA, 20 bp, synthetic construct
  misc_feature 1..20: note = Antisense Oligonucleotide
  source 1..20: mol_type = other DNA
cctacgccatcagctccaac

SEQ ID NO: 879 - DNA, 20 bp, synthetic construct
  misc_feature 1..20: note = Antisense Oligonucleotide
  source 1..20: mol_type = other DNA
gcctacgccatcagctccaa

SEQ ID NO: 880 - DNA, 20 bp, synthetic construct
  misc_feature 1..20: note = Antisense Oligonucleotide
  source 1..20: mol_type = other DNA
tgcctacgccatcagctcca

SEQ ID NO: 881 - DNA, 20 bp, synthetic construct
  misc_feature 1..20: note = Antisense Oligonucleotide
  source 1..20: mol_type = other DNA
ttgcctacgccatcagctcc

SEQ ID NO: 882 - DNA, 20 bp, synthetic construct
  misc_feature 1..20: note = Antisense Oligonucleotide
  source 1..20: mol_type = other DNA
cttgcctacgccatcagctc

SEQ ID NO: 883 - DNA, 20 bp, synthetic construct
  misc_feature 1..20: note = Antisense Oligonucleotide
  source 1..20: mol_type = other DNA
tcttgcctacgccatcagct

SEQ ID NO: 884 - DNA, 20 bp, synthetic construct
  misc_feature 1..20: note = Antisense Oligonucleotide
  source 1..20: mol_type = other DNA
ctcttgcctacgccatcagc

SEQ ID NO: 885 - DNA, 20 bp, synthetic construct
  misc_feature 1..20: note = Antisense Oligonucleotide
  source 1..20: mol_type = other DNA
actcttgcctacgccatcag

SEQ ID NO: 886 - DNA, 20 bp, synthetic construct
  misc_feature 1..20: note = Antisense Oligonucleotide
  source 1..20: mol_type = other DNA
cactcttgcctacgccatca

SEQ ID NO: 887 - DNA, 20 bp, synthetic construct
  misc_feature 1..20: note = Antisense Oligonucleotide
  source 1..20: mol_type = other DNA
gcactcttgcctacgccatc

SEQ ID NO: 888 - DNA, 20 bp, synthetic construct
  misc_feature 1..20: note = Antisense Oligonucleotide
  source 1..20: mol_type = other DNA
ggcactcttgcctacgccat

SEQ ID NO: 889 - DNA, 17 bp, synthetic construct
  misc_feature 1..17: note = Antisense Oligonucleotide
  source 1..17: mol_type = other DNA
ggtaggcgcctcagtcg

SEQ ID NO: 890 - DNA, 20 bp, synthetic construct
  misc_feature 1..20: note = Antisense Oligonucleotide
  source 1..20: mol_type = other DNA
ggtaggcgcctcagtcgtat

SEQ ID NO: 891 - DNA, 20 bp, synthetic construct
  misc_feature 1..20: note = Antisense Oligonucleotide
  source 1..20: mol_type = other DNA
aggtaggcgcctcagtcgta

SEQ ID NO: 892 - DNA, 15 bp, synthetic construct
  misc_feature 1..15: note = Antisense Oligonucleotide
  source 1..15: mol_type = other DNA
atttgttgacgggtc

SEQ ID NO: 893 - DNA, 20 bp, synthetic construct
  misc_feature 1..20: note = Antisense Oligonucleotide
  source 1..20: mol_type = other DNA
gattctttgctggccgcata

SEQ ID NO: 894 - DNA, 20 bp, synthetic construct
  misc_feature 1..20: note = Antisense Oligonucleotide
  source 1..20: mol_type = other DNA
cgtagattgtgctgatagag

SEQ ID NO: 895 - DNA, 17 bp, synthetic construct
  misc_feature 1..17: note = Antisense Oligonucleotide
  source 1..17: mol_type = other DNA
gtaggcgcctcagtcgt

SEQ ID NO: 896 - DNA, 20 bp, synthetic construct
  misc_feature 1..20: note = Antisense Oligonucleotide
  source 1..20: mol_type = other DNA
caggtaggcgcctcagtcgt

SEQ ID NO: 897 - DNA, 20 bp, synthetic construct
  misc_feature 1..20: note = Antisense Oligonucleotide
  source 1..20: mol_type = other DNA
cgccagctcactcacgatgc

SEQ ID NO: 898 - DNA, 16 bp, synthetic construct
  misc_feature 1..16: note = Antisense Oligonucleotide
  source 1..16: mol_type = other DNA
cgtactccatcgctga

SEQ ID NO: 899 - DNA, 20 bp, synthetic construct
  misc_feature 1..20: note = Antisense Oligonucleotide
  source 1..20: mol_type = other DNA
tagtcagctgctcgatgctc

SEQ ID NO: 900 - DNA, 16 bp, synthetic construct
  misc_feature 1..16: note = Antisense Oligonucleotide
  source 1..16: mol_type = other DNA
taggcgcctcagtcgt

SEQ ID NO: 901 - DNA, 16 bp, synthetic construct
  misc_feature 1..16: note = Antisense Oligonucleotide
  source 1..16: mol_type = other DNA
cacaattggctcggcc

SEQ ID NO: 902 - DNA, 20 bp, synthetic construct
  misc_feature 1..20: note = Antisense Oligonucleotide
  source 1..20: mol_type = other DNA
cacgtactccatcgctgaca

SEQ ID NO: 903 - DNA, 20 bp, synthetic construct
  misc_feature 1..20: note = Antisense Oligonucleotide
  source 1..20: mol_type = other DNA
cgacaatactttccgaatgc

SEQ ID NO: 904 - DNA, 15 bp, synthetic construct
  misc_feature 1..15: note = Antisense Oligonucleotide
  source 1..15: mol_type = other DNA
cgacaatactttccg

SEQ ID NO: 905 - DNA, 20 bp, synthetic construct
  misc_feature 1..20: note = Antisense Oligonucleotide
  source 1..20: mol_type = other DNA
aagcggctatactgctggtc

SEQ ID NO: 906 - DNA, 17 bp, synthetic construct
  misc_feature 1..17: note = Antisense Oligonucleotide
  source 1..17: mol_type = other DNA
gccgacaatactttccg

SEQ ID NO: 907 - DNA, 15 bp, synthetic construct
  misc_feature 1..15: note = Antisense Oligonucleotide
  source 1..15: mol_type = other DNA
acgtactccatcgct

SEQ ID NO: 908 - DNA, 20 bp, synthetic construct
  misc_feature 1..20: note = Antisense Oligonucleotide
  source 1..20: mol_type = other DNA
gtaggcgcctcagtcgtatc

SEQ ID NO: 909 - DNA, 20 bp, synthetic construct
  misc_feature 1..20: note = Antisense Oligonucleotide
  source 1..20: mol_type = other DNA
aggcaccgggccacaatccg

SEQ ID NO: 910 - DNA, 20 bp, synthetic construct
  misc_feature 1..20: note = Antisense Oligonucleotide
  source 1..20: mol_type = other DNA
cgatgctcagtcctcgcttg

SEQ ID NO: 911 - DNA, 16 bp, synthetic construct
  misc_feature 1..16: note = Antisense Oligonucleotide
  source 1..16: mol_type = other DNA
atcggccggtgctgta

SEQ ID NO: 912 - DNA, 17 bp, synthetic construct
  misc_feature 1..17: note = Antisense Oligonucleotide
  source 1..17: mol_type = other DNA
taggcgcctcagtcgta

SEQ ID NO: 913 - DNA, 20 bp, synthetic construct
  misc_feature 1..20: note = Antisense Oligonucleotide
  source 1..20: mol_type = other DNA
agttttctagccgatctagg

SEQ ID NO: 914 - DNA, 20 bp, synthetic construct
  misc_feature 1..20: note = Antisense Oligonucleotide
  source 1..20: mol_type = other DNA
ccgacaatactttccgaatg

SEQ ID NO: 915 - DNA, 20 bp, synthetic construct
  misc_feature 1..20: note = Antisense Oligonucleotide
  source 1..20: mol_type = other DNA
aatccgggcaatctccattg

SEQ ID NO: 916 - DNA, 16 bp, synthetic construct
  misc_feature 1..16: note = Antisense Oligonucleotide
  source 1..16: mol_type = other DNA
cgggcaatctccattg

SEQ ID NO: 917 - DNA, 20 bp, synthetic construct
  misc_feature 1..20: note = Antisense Oligonucleotide
  source 1..20: mol_type = other DNA
taatttgttgacgggtctga

SEQ ID NO: 918 - DNA, 20 bp, synthetic construct
  misc_feature 1..20: note = Antisense Oligonucleotide
  source 1..20: mol_type = other DNA
tgtagtcagctgctcgatgc

SEQ ID NO: 919 - DNA, 20 bp, synthetic construct
  misc_feature 1..20: note = Antisense Oligonucleotide
  source 1..20: mol_type = other DNA
tgattcttcgtagattgtgc

SEQ ID NO: 920 - DNA, 17 bp, synthetic construct
  misc_feature 1..17: note = Antisense Oligonucleotide
  source 1..17: mol_type = other DNA
acgtactccatcgctga

SEQ ID NO: 921 - DNA, 20 bp, synthetic construct
  misc_feature 1..20: note = Antisense Oligonucleotide
  source 1..20: mol_type = other DNA
gtagtcagctgctcgatgct

SEQ ID NO: 922 - DNA, 20 bp, synthetic construct
  misc_feature 1..20: note = Antisense Oligonucleotide
  source 1..20: mol_type = other DNA
tggctctctggccgacaata

SEQ ID NO: 923 - DNA, 20 bp, synthetic construct
  misc_feature 1..20: note = Antisense Oligonucleotide
  source 1..20: mol_type = other DNA
ttgttgacgggtctgaagtt

SEQ ID NO: 924 - DNA, 20 bp, synthetic construct
  misc_feature 1..20: note = Antisense Oligonucleotide
  source 1..20: mol_type = other DNA
tagtgaactggacgccggtc

SEQ ID NO: 925 - DNA, 20 bp, synthetic construct
  misc_feature 1..20: note = Antisense Oligonucleotide
  source 1..20: mol_type = other DNA
gtagtgaactggacgccggt

SEQ ID NO: 926 - DNA, 20 bp, synthetic construct
  misc_feature 1..20: note = Antisense Oligonucleotide
  source 1..20: mol_type = other DNA
gccacaatccgggcaatctc

SEQ ID NO: 927 - DNA, 16 bp, synthetic construct
  misc_feature 1..16: note = Antisense Oligonucleotide
  source 1..16: mol_type = other DNA
gaactggacgccggtc

SEQ ID NO: 928 - DNA, 20 bp, synthetic construct
  misc_feature 1..20: note = Antisense Oligonucleotide
  source 1..20: mol_type = other DNA
gacgggtctgaagttgagat

SEQ ID NO: 929 - DNA, 15 bp, synthetic construct
  misc_feature 1..15: note = Antisense Oligonucleotide
  source 1..15: mol_type = other DNA
gaactggacgccggt

SEQ ID NO: 930 - DNA, 17 bp, synthetic construct
  misc_feature 1..17: note = Antisense Oligonucleotide
  source 1..17: mol_type = other DNA
atcggccggtgctgtac

SEQ ID NO: 931 - DNA, 20 bp, synthetic construct
  misc_feature 1..20: note = Antisense Oligonucleotide
  source 1..20: mol_type = other DNA
aagcatcacaattggctcgg

SEQ ID NO: 932 - DNA, 15 bp, synthetic construct
  misc_feature 1..15: note = Antisense Oligonucleotide
  source 1..15: mol_type = other DNA
gcgcctcagtcgtat

SEQ ID NO: 933 - DNA, 20 bp, synthetic construct
  misc_feature 1..20: note = Antisense Oligonucleotide
  source 1..20: mol_type = other DNA
gcttgattcttcgtagattg

SEQ ID NO: 934 - DNA, 20 bp, synthetic construct
  misc_feature 1..20: note = Antisense Oligonucleotide
  source 1..20: mol_type = other DNA
ggctctctggccgacaatac

SEQ ID NO: 935 - DNA, 20 bp, synthetic construct
  misc_feature 1..20: note = Antisense Oligonucleotide
  source 1..20: mol_type = other DNA
cagtgtagtcagctgctcga

SEQ ID NO: 936 - DNA, 20 bp, synthetic construct
  misc_feature 1..20: note = Antisense Oligonucleotide
  source 1..20: mol_type = other DNA
acgtactccatcgctgacaa

SEQ ID NO: 937 - DNA, 20 bp, synthetic construct
  misc_feature 1..20: note = Antisense Oligonucleotide
  source 1..20: mol_type = other DNA
atccgggcaatctccattgg

SEQ ID NO: 938 - DNA, 20 bp, synthetic construct
  misc_feature 1..20: note = Antisense Oligonucleotide
  source 1..20: mol_type = other DNA
ggttccacggactggatctg

SEQ ID NO: 939 - DNA, 20 bp, synthetic construct
  misc_feature 1..20: note = Antisense Oligonucleotide
  source 1..20: mol_type = other DNA
gcatcacaattggctcggcc

SEQ ID NO: 940 - DNA, 20 bp, synthetic construct
  misc_feature 1..20: note = Antisense Oligonucleotide
  source 1..20: mol_type = other DNA
gccgatctaggcagatgttg

SEQ ID NO: 941 - DNA, 20 bp, synthetic construct
  misc_feature 1..20: note = Antisense Oligonucleotide
  source 1..20: mol_type = other DNA
gcacgtactccatcgctgac

SEQ ID NO: 942 - DNA, 15 bp, synthetic construct
  misc_feature 1..15: note = Antisense Oligonucleotide
  source 1..15: mol_type = other DNA
actggacgccggtct

SEQ ID NO: 943 - DNA, 20 bp, synthetic construct
  misc_feature 1..20: note = Antisense Oligonucleotide
  source 1..20: mol_type = other DNA
catcggccggtgctgtacaa

SEQ ID NO: 944 - DNA, 16 bp, synthetic construct
  misc_feature 1..16: note = Antisense Oligonucleotide
  source 1..16: mol_type = other DNA
actggacgccggtctt

SEQ ID NO: 945 - DNA, 15 bp, synthetic construct
  misc_feature 1..15: note = Antisense Oligonucleotide
  source 1..15: mol_type = other DNA
ggcgcctcagtcgta

SEQ ID NO: 946 - DNA, 20 bp, synthetic construct
  misc_feature 1..20: note = Antisense Oligonucleotide
  source 1..20: mol_type = other DNA
gccgacaatactttccgaat

SEQ ID NO: 947 - DNA, 15 bp, synthetic construct
  misc_feature 1..15: note = Antisense Oligonucleotide
  source 1..15: mol_type = other DNA
ggacgccggtcttga

SEQ ID NO: 948 - DNA, 17 bp, synthetic construct
  misc_feature 1..17: note = Antisense Oligonucleotide
  source 1..17: mol_type = other DNA
tagtgaactggacgccg

SEQ ID NO: 949 - DNA, 20 bp, synthetic construct
  misc_feature 1..20: note = Antisense Oligonucleotide
  source 1..20: mol_type = other DNA
ggcaccgggccacaatccgg

SEQ ID NO: 950 - DNA, 20 bp, synthetic construct
  misc_feature 1..20: note = Antisense Oligonucleotide
  source 1..20: mol_type = other DNA
cgtactccatcgctgacaaa

SEQ ID NO: 951 - DNA, 17 bp, synthetic construct
  misc_feature 1..17: note = Antisense Oligonucleotide
  source 1..17: mol_type = other DNA
catcggccggtgctgta

SEQ ID NO: 952 - DNA, 20 bp, synthetic construct
  misc_feature 1..20: note = Antisense Oligonucleotide
  source 1..20: mol_type = other DNA
cggccggtgctgtacaatgg

SEQ ID NO: 953 - DNA, 20 bp, synthetic construct
  misc_feature 1..20: note = Antisense Oligonucleotide
  source 1..20: mol_type = other DNA
gcggctatactgctggtcaa

SEQ ID NO: 954 - DNA, 20 bp, synthetic construct
  misc_feature 1..20: note = Antisense Oligonucleotide
  source 1..20: mol_type = other DNA
atgttaaatttccgggatcc

SEQ ID NO: 955 - DNA, 15 bp, synthetic construct
  misc_feature 1..15: note = Antisense Oligonucleotide
  source 1..15: mol_type = other DNA
cgccggtcttgatga

SEQ ID NO: 956 - DNA, 20 bp, synthetic construct
  misc_feature 1..20: note = Antisense Oligonucleotide
  source 1..20: mol_type = other DNA
ctggccgacaatactttccg

SEQ ID NO: 957 - DNA, 15 bp, synthetic construct
  misc_feature 1..15: note = Antisense Oligonucleotide
  source 1..15: mol_type = other DNA
aactggacgccggtc

SEQ ID NO: 958 - DNA, 16 bp, synthetic construct
  misc_feature 1..16: note = Antisense Oligonucleotide
  source 1..16: mol_type = other DNA
aactggacgccggtct

SEQ ID NO: 959 - DNA, 20 bp, synthetic construct
  misc_feature 1..20: note = Antisense Oligonucleotide
  source 1..20: mol_type = other DNA
caccgggccacaatccgggc

SEQ ID NO: 960 - DNA, 20 bp, synthetic construct
  misc_feature 1..20: note = Antisense Oligonucleotide
  source 1..20: mol_type = other DNA
tggccgacaatactttccga

SEQ ID NO: 961 - DNA, 20 bp, synthetic construct
  misc_feature 1..20: note = Antisense Oligonucleotide
  source 1..20: mol_type = other DNA
gtgctcaagatggcccgctc

SEQ ID NO: 962 - DNA, 20 bp, synthetic construct
  misc_feature 1..20: note = Antisense Oligonucleotide
  source 1..20: mol_type = other DNA
tcgctgacaaaagccccgcc

SEQ ID NO: 963 - DNA, 20 bp, synthetic construct
  misc_feature 1..20: note = Antisense Oligonucleotide
  source 1..20: mol_type = other DNA
acaatccgggcaatctccat

SEQ ID NO: 964 - DNA, 20 bp, synthetic construct
  misc_feature 1..20: note = Antisense Oligonucleotide
  source 1..20: mol_type = other DNA
ggccggtgctgtacaatggg

SEQ ID NO: 965 - DNA, 15 bp, synthetic construct
  misc_feature 1..15: note = Antisense Oligonucleotide
  source 1..15: mol_type = other DNA
tggacgccggtcttg

SEQ ID NO: 966 - DNA, 20 bp, synthetic construct
  misc_feature 1..20: note = Antisense Oligonucleotide
  source 1..20: mol_type = other DNA
atcgctgacaaaagccccgc

SEQ ID NO: 967 - DNA, 20 bp, synthetic construct
  misc_feature 1..20: note = Antisense Oligonucleotide
  source 1..20: mol_type = other DNA
gcatcggccggtgctgtaca

SEQ ID NO: 968 - DNA, 20 bp, synthetic construct
  misc_feature 1..20: note = Antisense Oligonucleotide
  source 1..20: mol_type = other DNA
accgggccacaatccgggca

SEQ ID NO: 969 - DNA, 20 bp, synthetic construct
  misc_feature 1..20: note = Antisense Oligonucleotide
  source 1..20: mol_type = other DNA
atcggccggtgctgtacaat

SEQ ID NO: 970 - DNA, 20 bp, synthetic construct
  misc_feature 1..20: note = Antisense Oligonucleotide
  source 1..20: mol_type = other DNA
aattggctcggcccccattc

SEQ ID NO: 971 - DNA, 20 bp, synthetic construct
  misc_feature 1..20: note = Antisense Oligonucleotide
  source 1..20: mol_type = other DNA
tgcacgtactccatcgctga

SEQ ID NO: 972 - DNA, 20 bp, synthetic construct
  misc_feature 1..20: note = Antisense Oligonucleotide
  source 1..20: mol_type = other DNA
cgggccacaatccgggcaat

SEQ ID NO: 973 - DNA, 20 bp, synthetic construct
  misc_feature 1..20: note = Antisense Oligonucleotide
  source 1..20: mol_type = other DNA
aggcgcctcagtcgtatctt

SEQ ID NO: 974 - DNA, 20 bp, synthetic construct
  misc_feature 1..20: note = Antisense Oligonucleotide
  source 1..20: mol_type = other DNA
ggcgcctcagtcgtatcttt

SEQ ID NO: 975 - DNA, 20 bp, synthetic construct
  misc_feature 1..20: note = Antisense Oligonucleotide
  source 1..20: mol_type = other DNA
catcgctgacaaaagccccg

SEQ ID NO: 976 - DNA, 20 bp, synthetic construct
  misc_feature 1..20: note = Antisense Oligonucleotide
  source 1..20: mol_type = other DNA
tccgcatctggtccagcgca

SEQ ID NO: 977 - DNA, 20 bp, synthetic construct
  misc_feature 1..20: note = Antisense Oligonucleotide
  source 1..20: mol_type = other DNA
cgatgcttctccgcatctgg

SEQ ID NO: 978 - DNA, 20 bp, synthetic construct
  misc_feature 1..20: note = Antisense Oligonucleotide
  source 1..20: mol_type = other DNA
ggccgacaatactttccgaa

SEQ ID NO: 979 - DNA, 20 bp, synthetic construct
  misc_feature 1..20: note = Antisense Oligonucleotide
  source 1..20: mol_type = other DNA
ccgggccacaatccgggcaa

SEQ ID NO: 980 - DNA, 20 bp, synthetic construct
  misc_feature 1..20: note = Antisense Oligonucleotide
  source 1..20: mol_type = other DNA
ccgatctaggcagatgttgg

SEQ ID NO: 981 - DNA, 17 bp, synthetic construct
  misc_feature 1..17: note = Antisense Oligonucleotide
  source 1..17: mol_type = other DNA
accgggccacaatccgg

SEQ ID NO: 982 - DNA, 20 bp, synthetic construct
  misc_feature 1..20: note = Antisense Oligonucleotide
  source 1..20: mol_type = other DNA
gccggtgctgtacaatgggg

SEQ ID NO: 983 - DNA, 20 bp, synthetic construct
  misc_feature 1..20: note = Antisense Oligonucleotide
  source 1..20: mol_type = other DNA
ggccacaatccgggcaatct

SEQ ID NO: 984 - DNA, 20 bp, synthetic construct
  misc_feature 1..20: note = Antisense Oligonucleotide
  source 1..20: mol_type = other DNA
ggacctcggccacttgatcc

SEQ ID NO: 985 - DNA, 20 bp, synthetic construct
  misc_feature 1..20: note = Antisense Oligonucleotide
  source 1..20: mol_type = other DNA
agcatcggccggtgctgtac

SEQ ID NO: 986 - DNA, 16 bp, synthetic construct
  misc_feature 1..16: note = Antisense Oligonucleotide
  source 1..16: mol_type = other DNA
tagccgatctaggcag

SEQ ID NO: 987 - DNA, 15 bp, synthetic construct
  misc_feature 1..15: note = Antisense Oligonucleotide
  source 1..15: mol_type = other DNA
tagccgatctaggca

SEQ ID NO: 988 - DNA, 20 bp, synthetic construct
  misc_feature 1..20: note = Antisense Oligonucleotide
  source 1..20: mol_type = other DNA
cggtgctgtacaatggggtc

SEQ ID NO: 989 - DNA, 15 bp, synthetic construct
  misc_feature 1..15: note = Antisense Oligonucleotide
  source 1..15: mol_type = other DNA
gattgtcagtgcgct

SEQ ID NO: 990 - DNA, 15 bp, synthetic construct
  misc_feature 1..15: note = Antisense Oligonucleotide
  source 1..15: mol_type = other DNA
ggattgtcagtgcgc

SEQ ID NO: 991 - DNA, 15 bp, synthetic construct
  misc_feature 1..15: note = Antisense Oligonucleotide
  source 1..15: mol_type = other DNA
gagtcttttactcgc

SEQ ID NO: 992 - DNA, 15 bp, synthetic construct
  misc_feature 1..15: note = Antisense Oligonucleotide
  source 1..15: mol_type = other DNA
cggtactggcgtatt

SEQ ID NO: 993 - DNA, 15 bp, synthetic construct
  misc_feature 1..15: note = Antisense Oligonucleotide
  source 1..15: mol_type = other DNA
tcggtactggcgtat

SEQ ID NO: 994 - DNA, 15 bp, synthetic construct
  misc_feature 1..15: note = Antisense Oligonucleotide
  source 1..15: mol_type = other DNA
ttcggtactggcgta

SEQ ID NO: 995 - DNA, 15 bp, synthetic construct
  misc_feature 1..15: note = Antisense Oligonucleotide
  source 1..15: mol_type = other DNA
attcggtactggcgt

SEQ ID NO: 996 - DNA, 15 bp, synthetic construct
  misc_feature 1..15: note = Antisense Oligonucleotide
  source 1..15: mol_type = other DNA
ccggctaattgtaac

SEQ ID NO: 997 - DNA, 16 bp, synthetic construct
  misc_feature 1..16: note = Antisense Oligonucleotide
  source 1..16: mol_type = other DNA
tcggtactggcgtatt

SEQ ID NO: 998 - DNA, 16 bp, synthetic construct
  misc_feature 1..16: note = Antisense Oligonucleotide
  source 1..16: mol_type = other DNA
ttcggtactggcgtat

SEQ ID NO: 999 - DNA, 16 bp, synthetic construct
  misc_feature 1..16: note = Antisense Oligonucleotide
  source 1..16: mol_type = other DNA
attcggtactggcgta

SEQ ID NO: 1000 - DNA, 17 bp, synthetic construct
  misc_feature 1..17: note = Antisense Oligonucleotide
  source 1..17: mol_type = other DNA
cggtactggcgtatttc

SEQ ID NO: 1001 - DNA, 17 bp, synthetic construct
  misc_feature 1..17: note = Antisense Oligonucleotide
  source 1..17: mol_type = other DNA
tcggtactggcgtattt

SEQ ID NO: 1002 - DNA, 17 bp, synthetic construct
  misc_feature 1..17: note = Antisense Oligonucleotide
  source 1..17: mol_type = other DNA
ttcggtactggcgtatt

SEQ ID NO: 1003 - DNA, 17 bp, synthetic construct
  misc_feature 1..17: note = Antisense Oligonucleotide
  source 1..17: mol_type = other DNA
attcggtactggcgtat

SEQ ID NO: 1004 - DNA, 17 bp, synthetic construct
  misc_feature 1..17: note = Antisense Oligonucleotide
  source 1..17: mol_type = other DNA
cattcggtactggcgta

SEQ ID NO: 1005 - DNA, 17 bp, synthetic construct
  misc_feature 1..17: note = Antisense Oligonucleotide
  source 1..17: mol_type = other DNA
tcattcggtactggcgt

SEQ ID NO: 1006 - DNA, 20 bp, synthetic construct
  misc_feature 1..20: note = Antisense Oligonucleotide
  source 1..20: mol_type = other DNA
ccaccagtttgtactcagtc

SEQ ID NO: 1007 - DNA, 20 bp, synthetic construct
  misc_feature 1..20: note = Antisense Oligonucleotide
  source 1..20: mol_type = other DNA
ggattgtcagtgcgcttttc

SEQ ID NO: 1008 - DNA, 20 bp, synthetic construct
  misc_feature 1..20: note = Antisense Oligonucleotide
  source 1..20: mol_type = other DNA
gctggattgtcagtgcgctt

SEQ ID NO: 1009 - DNA, 20 bp, synthetic construct
  misc_feature 1..20: note = Antisense Oligonucleotide
  source 1..20: mol_type = other DNA
agctggattgtcagtgcgct

SEQ ID NO: 1010 - DNA, 20 bp, synthetic construct
  misc_feature 1..20: note = Antisense Oligonucleotide
  source 1..20: mol_type = other DNA
tagctggattgtcagtgcgc

SEQ ID NO: 1011 - DNA, 20 bp, synthetic construct
  misc_feature 1..20: note = Antisense Oligonucleotide
  source 1..20: mol_type = other DNA
attagctggattgtcagtgc

SEQ ID NO: 1012 - DNA, 20 bp, synthetic construct
  misc_feature 1..20: note = Antisense Oligonucleotide
  source 1..20: mol_type = other DNA
gtattggtctctcatggcac

SEQ ID NO: 1013 - DNA, 20 bp, synthetic construct
  misc_feature 1..20: note = Antisense Oligonucleotide
  source 1..20: mol_type = other DNA
gcctgtcctcatgtattggt

SEQ ID NO: 1014 - DNA, 20 bp, synthetic construct
  misc_feature 1..20: note = Antisense Oligonucleotide
  source 1..20: mol_type = other DNA
cgcctgtcctcatgtattgg

SEQ ID NO: 1015 - DNA, 20 bp, synthetic construct
  misc_feature 1..20: note = Antisense Oligonucleotide
  source 1..20: mol_type = other DNA
cttcgcctgtcctcatgtat

SEQ ID NO: 1016 - DNA, 20 bp, synthetic construct
  misc_feature 1..20: note = Antisense Oligonucleotide
  source 1..20: mol_type = other DNA
gacttgctattattgatggc

SEQ ID NO: 1017 - DNA, 20 bp, synthetic construct
  misc_feature 1..20: note = Antisense Oligonucleotide
  source 1..20: mol_type = other DNA
tgacttgctattattgatgg

SEQ ID NO: 1018 - DNA, 20 bp, synthetic construct
  misc_feature 1..20: note = Antisense Oligonucleotide
  source 1..20: mol_type = other DNA
atccgcaaatgacttgctat

SEQ ID NO: 1019 - DNA, 20 bp, synthetic construct
  misc_feature 1..20: note = Antisense Oligonucleotide
  source 1..20: mol_type = other DNA
tatccgcaaatgacttgcta

SEQ ID NO: 1020 - DNA, 20 bp, synthetic construct
  misc_feature 1..20: note = Antisense Oligonucleotide
  source 1..20: mol_type = other DNA
tagaggttaatatccgcaaa

SEQ ID NO: 1021 - DNA, 20 bp, synthetic construct
  misc_feature 1..20: note = Antisense Oligonucleotide
  source 1..20: mol_type = other DNA
gtagaggttaatatccgcaa

SEQ ID NO: 1022 - DNA, 20 bp, synthetic construct
  misc_feature 1..20: note = Antisense Oligonucleotide
  source 1..20: mol_type = other DNA
tgtagaggttaatatccgca

SEQ ID NO: 1023 - DNA, 20 bp, synthetic construct
  misc_feature 1..20: note = Antisense Oligonucleotide
  source 1..20: mol_type = other DNA
ctgtagaggttaatatccgc

SEQ ID NO: 1024 - DNA, 20 bp, synthetic construct
  misc_feature 1..20: note = Antisense Oligonucleotide
  source 1..20: mol_type = other DNA
tgctccctgtagaggttaat

SEQ ID NO: 1025 - DNA, 20 bp, synthetic construct
  misc_feature 1..20: note = Antisense Oligonucleotide
  source 1..20: mol_type = other DNA
tactcgcttaatctgctccc

SEQ ID NO: 1026 - DNA, 20 bp, synthetic construct
  misc_feature 1..20: note = Antisense Oligonucleotide
  source 1..20: mol_type = other DNA
ttactcgcttaatctgctcc

SEQ ID NO: 1027 - DNA, 20 bp, synthetic construct
  misc_feature 1..20: note = Antisense Oligonucleotide
  source 1..20: mol_type = other DNA
gagtcttttactcgcttaat

SEQ ID NO: 1028 - DNA, 20 bp, synthetic construct
  misc_feature 1..20: note = Antisense Oligonucleotide
  source 1..20: mol_type = other DNA
atcaactgtccttgttggca

SEQ ID NO: 1029 - DNA, 20 bp, synthetic construct
  misc_feature 1..20: note = Antisense Oligonucleotide
  source 1..20: mol_type = other DNA
gccagttcgtgggcttgttt

SEQ ID NO: 1030 - DNA, 20 bp, synthetic construct
  misc_feature 1..20: note = Antisense Oligonucleotide
  source 1..20: mol_type = other DNA
ggccagttcgtgggcttgtt

SEQ ID NO: 1031 - DNA, 20 bp, synthetic construct
  misc_feature 1..20: note = Antisense Oligonucleotide
  source 1..20: mol_type = other DNA
actcttggccagttcgtggg

SEQ ID NO: 1032 - DNA, 20 bp, synthetic construct
  misc_feature 1..20: note = Antisense Oligonucleotide
  source 1..20: mol_type = other DNA
aactcttggccagttcgtgg

SEQ ID NO: 1033 - DNA, 20 bp, synthetic construct
  misc_feature 1..20: note = Antisense Oligonucleotide
  source 1..20: mol_type = other DNA
taactcttggccagttcgtg

SEQ ID NO: 1034 - DNA, 20 bp, synthetic construct
  misc_feature 1..20: note = Antisense Oligonucleotide
  source 1..20: mol_type = other DNA
cgtaactcttggccagttcg

SEQ ID NO: 1035 - DNA, 20 bp, synthetic construct
  misc_feature 1..20: note = Antisense Oligonucleotide
  source 1..20: mol_type = other DNA
tggaatcccgtaactcttgg

SEQ ID NO: 1036 - DNA, 20 bp, synthetic construct
  misc_feature 1..20: note = Antisense Oligonucleotide
  source 1..20: mol_type = other DNA
aatggaatcccgtaactctt

SEQ ID NO: 1037 - DNA, 20 bp, synthetic construct
  misc_feature 1..20: note = Antisense Oligonucleotide
  source 1..20: mol_type = other DNA
gaatggaatcccgtaactct

SEQ ID NO: 1038 - DNA, 20 bp, synthetic construct
  misc_feature 1..20: note = Antisense Oligonucleotide
  source 1..20: mol_type = other DNA
tgaatggaatcccgtaactc

SEQ ID NO: 1039 - DNA, 20 bp, synthetic construct
  misc_feature 1..20: note = Antisense Oligonucleotide
  source 1..20: mol_type = other DNA
atgaatggaatcccgtaact

SEQ ID NO: 1040 - DNA, 20 bp, synthetic construct
  misc_feature 1..20: note = Antisense Oligonucleotide
  source 1..20: mol_type = other DNA
caatgaatggaatcccgtaa

SEQ ID NO: 1041 - DNA, 20 bp, synthetic construct
  misc_feature 1..20: note = Antisense Oligonucleotide
  source 1..20: mol_type = other DNA
gcgtatttctcttaccagtg

SEQ ID NO: 1042 - DNA, 20 bp, synthetic construct
  misc_feature 1..20: note = Antisense Oligonucleotide
  source 1..20: mol_type = other DNA
ggtactggcgtatttctctt

SEQ ID NO: 1043 - DNA, 20 bp, synthetic construct
  misc_feature 1..20: note = Antisense Oligonucleotide
  source 1..20: mol_type = other DNA
cggtactggcgtatttctct

SEQ ID NO: 1044 - DNA, 20 bp, synthetic construct
  misc_feature 1..20: note = Antisense Oligonucleotide
  source 1..20: mol_type = other DNA
tcggtactggcgtatttctc

SEQ ID NO: 1045 - DNA, 20 bp, synthetic construct
  misc_feature 1..20: note = Antisense Oligonucleotide
  source 1..20: mol_type = other DNA
ttcggtactggcgtatttct

SEQ ID NO: 1046 - DNA, 20 bp, synthetic construct
  misc_feature 1..20: note = Antisense Oligonucleotide
  source 1..20: mol_type = other DNA
attcggtactggcgtatttc

SEQ ID NO: 1047 - DNA, 20 bp, synthetic construct
  misc_feature 1..20: note = Antisense Oligonucleotide
  source 1..20: mol_type = other DNA
cattcggtactggcgtattt

SEQ ID NO: 1048 - DNA, 20 bp, synthetic construct
  misc_feature 1..20: note = Antisense Oligonucleotide
  source 1..20: mol_type = other DNA
tcattcggtactggcgtatt

SEQ ID NO: 1049 - DNA, 20 bp, synthetic construct
  misc_feature 1..20: note = Antisense Oligonucleotide
  source 1..20: mol_type = other DNA
ttcattcggtactggcgtat

SEQ ID NO: 1050 - DNA, 20 bp, synthetic construct
  misc_feature 1..20: note = Antisense Oligonucleotide
  source 1..20: mol_type = other DNA
tttcattcggtactggcgta

SEQ ID NO: 1051 - DNA, 20 bp, synthetic construct
  misc_feature 1..20: note = Antisense Oligonucleotide
  source 1..20: mol_type = other DNA
ttttcattcggtactggcgt

SEQ ID NO: 1052 - DNA, 20 bp, synthetic construct
  misc_feature 1..20: note = Antisense Oligonucleotide
  source 1..20: mol_type = other DNA
ttttttcattcggtactggc

SEQ ID NO: 1053 - DNA, 20 bp, synthetic construct
  misc_feature 1..20: note = Antisense Oligonucleotide
  source 1..20: mol_type = other DNA
gttttttcattcggtactgg

SEQ ID NO: 1054 - DNA, 20 bp, synthetic construct
  misc_feature 1..20: note = Antisense Oligonucleotide
  source 1..20: mol_type = other DNA
agttttttcattcggtactg

SEQ ID NO: 1055 - DNA, 20 bp, synthetic construct
  misc_feature 1..20: note = Antisense Oligonucleotide
  source 1..20: mol_type = other DNA
gtatcttgttacatcaccac

SEQ ID NO: 1056 - DNA, 20 bp, synthetic construct
  misc_feature 1..20: note = Antisense Oligonucleotide
  source 1..20: mol_type = other DNA
agtatcttgttacatcacca

SEQ ID NO: 1057 - DNA, 20 bp, synthetic construct
  misc_feature 1..20: note = Antisense Oligonucleotide
  source 1..20: mol_type = other DNA
gtgcagcttgaaagtggctc

SEQ ID NO: 1058 - DNA, 20 bp, synthetic construct
  misc_feature 1..20: note = Antisense Oligonucleotide
  source 1..20: mol_type = other DNA
gtactaaactactgagagct

SEQ ID NO: 1059 - DNA, 20 bp, synthetic construct
  misc_feature 1..20: note = Antisense Oligonucleotide
  source 1..20: mol_type = other DNA
tgtactaaactactgagagc

SEQ ID NO: 1060 - DNA, 20 bp, synthetic construct
  misc_feature 1..20: note = Antisense Oligonucleotide
  source 1..20: mol_type = other DNA
gggagtaacaagaggtgcat

SEQ ID NO: 1061 - DNA, 20 bp, synthetic construct
  misc_feature 1..20: note = Antisense Oligonucleotide
  source 1..20: mol_type = other DNA
aacagggagtaacaagaggt

SEQ ID NO: 1062 - DNA, 20 bp, synthetic construct
  misc_feature 1..20: note = Antisense Oligonucleotide
  source 1..20: mol_type = other DNA
gttgctactttagagctcaa

SEQ ID NO: 1063 - DNA, 20 bp, synthetic construct
  misc_feature 1..20: note = Antisense Oligonucleotide
  source 1..20: mol_type = other DNA
cagttgctactttagagctc

SEQ ID NO: 1064 - DNA, 20 bp, synthetic construct
  misc_feature 1..20: note = Antisense Oligonucleotide
  source 1..20: mol_type = other DNA
gaaagttggatttaattacg

SEQ ID NO: 1065 - DNA, 20 bp, synthetic construct
  misc_feature 1..20: note = Antisense Oligonucleotide
  source 1..20: mol_type = other DNA
gcatctgctctcaaatagat

SEQ ID NO: 1066 - DNA, 20 bp, synthetic construct
  misc_feature 1..20: note = Antisense Oligonucleotide
  source 1..20: mol_type = other DNA
tataggtagtaacctatgaa

SEQ ID NO: 1067 - DNA, 20 bp, synthetic construct
  misc_feature 1..20: note = Antisense Oligonucleotide
  source 1..20: mol_type = other DNA
gtataggtagtaacctatga

SEQ ID NO: 1068 - DNA, 20 bp, synthetic construct
  misc_feature 1..20: note = Antisense Oligonucleotide
  source 1..20: mol_type = other DNA
attgtataggtagtaaccta

SEQ ID NO: 1069 - DNA, 20 bp, synthetic construct
  misc_feature 1..20: note = Antisense Oligonucleotide
  source 1..20: mol_type = other DNA
cattgtataggtagtaacct

SEQ ID NO: 1070 - DNA, 20 bp, synthetic construct
  misc_feature 1..20: note = Antisense Oligonucleotide
  source 1..20: mol_type = other DNA
acattgtataggtagtaacc

SEQ ID NO: 1071 - DNA, 20 bp, synthetic construct
  misc_feature 1..20: note = Antisense Oligonucleotide
  source 1..20: mol_type = other DNA
ccctggtccattagcaccat

SEQ ID NO: 1072 - DNA, 20 bp, synthetic construct
  misc_feature 1..20: note = Antisense Oligonucleotide
  source 1..20: mol_type = other DNA
accctggtccattagcacca

SEQ ID NO: 1073 - DNA, 20 bp, synthetic construct
  misc_feature 1..20: note = Antisense Oligonucleotide
  source 1..20: mol_type = other DNA
gaccctggtccattagcacc

SEQ ID NO: 1074 - DNA, 20 bp, synthetic construct
  misc_feature 1..20: note = Antisense Oligonucleotide
  source 1..20: mol_type = other DNA
tgaccctggtccattagcac

SEQ ID NO: 1075 - DNA, 20 bp, synthetic construct
  misc_feature 1..20: note = Antisense Oligonucleotide
  source 1..20: mol_type = other DNA
ctgtgaccctggtccattag

SEQ ID NO: 1076 - DNA, 20 bp, synthetic construct
  misc_feature 1..20: note = Antisense Oligonucleotide
  source 1..20: mol_type = other DNA
aaactgtgaccctggtccat

SEQ ID NO: 1077 - DNA, 20 bp, synthetic construct
  misc_feature 1..20: note = Antisense Oligonucleotide
  source 1..20: mol_type = other DNA
gtaaagggtttgtgctaact

SEQ ID NO: 1078 - DNA, 20 bp, synthetic construct
  misc_feature 1..20: note = Antisense Oligonucleotide
  source 1..20: mol_type = other DNA
ggtaaagggtttgtgctaac

SEQ ID NO: 1079 - DNA, 20 bp, synthetic construct
  misc_feature 1..20: note = Antisense Oligonucleotide
  source 1..20: mol_type = other DNA
ccagtcatggtaaagggttt

SEQ ID NO: 1080 - DNA, 20 bp, synthetic construct
  misc_feature 1..20: note = Antisense Oligonucleotide
  source 1..20: mol_type = other DNA
taccagggtattatctgcaa

SEQ ID NO: 1081 - DNA, 20 bp, synthetic construct
  misc_feature 1..20: note = Antisense Oligonucleotide
  source 1..20: mol_type = other DNA
attaccagggtattatctgc

SEQ ID NO: 1082 - DNA, 20 bp, synthetic construct
  misc_feature 1..20: note = Antisense Oligonucleotide
  source 1..20: mol_type = other DNA
ctgaggtgataagcctcagg

SEQ ID NO: 1083 - DNA, 20 bp, synthetic construct
  misc_feature 1..20: note = Antisense Oligonucleotide
  source 1..20: mol_type = other DNA
actgaggtgataagcctcag

SEQ ID NO: 1084 - DNA, 20 bp, synthetic construct
  misc_feature 1..20: note = Antisense Oligonucleotide
  source 1..20: mol_type = other DNA
gactgaggtgataagcctca

SEQ ID NO: 1085 - DNA, 20 bp, synthetic construct
  misc_feature 1..20: note = Antisense Oligonucleotide
  source 1..20: mol_type = other DNA
catacaagggctattggcac

SEQ ID NO: 1086 - DNA, 20 bp, synthetic construct
  misc_feature 1..20: note = Antisense Oligonucleotide
  source 1..20: mol_type = other DNA
gactaaacatgggcccacta

SEQ ID NO: 1087 - DNA, 20 bp, synthetic construct
  misc_feature 1..20: note = Antisense Oligonucleotide
  source 1..20: mol_type = other DNA
tccatcttaggtcagtactc

SEQ ID NO: 1088 - DNA, 20 bp, synthetic construct
  misc_feature 1..20: note = Antisense Oligonucleotide
  source 1..20: mol_type = other DNA
gtcttacaacttccacggac

SEQ ID NO: 1089 - DNA, 20 bp, synthetic construct
  misc_feature 1..20: note = Antisense Oligonucleotide
  source 1..20: mol_type = other DNA
tcgaagtactcggcgtaggt

SEQ ID NO: 1090 - DNA, 20 bp, synthetic construct
  misc_feature 1..20: note = Antisense Oligonucleotide
  source 1..20: mol_type = other DNA
aacccagggtcggactcgat

SEQ ID NO: 1091 - DNA, 20 bp, synthetic construct
  misc_feature 1..20: note = Antisense Oligonucleotide
  source 1..20: mol_type = other DNA
gcaagatcccggattcggtc

SEQ ID NO: 1092 - DNA, 20 bp, synthetic construct
  misc_feature 1..20: note = Antisense Oligonucleotide
  source 1..20: mol_type = other DNA
gacgtggcacctcttgagga

SEQ ID NO: 1093 - DNA, 18 bp, synthetic construct
  misc_feature 1..18: note = Antisense Oligonucleotide
  source 1..18: mol_type = other DNA
gctattaccttaacccag

SEQ ID NO: 1094 - protein, 5 aa, synthetic construct
WWWWW

SEQ ID NO: 1095 - protein, 7 aa, synthetic construct
FFLIPKG

SEQ ID NO: 1096 - protein, 11 aa, synthetic construct
YGRKKRRQRRR

SEQ ID NO: 1097 - protein, 16 aa, synthetic construct
RQIKIWFQNRRMKWKK

SEQ ID NO: 1098 - protein, 16 aa, synthetic construct
RKKRRRESRKKRRRES

SEQ ID NO: 1099 - protein, 17 aa, synthetic construct
GRPRESGKKRKRKRLKP

SEQ ID NO: 1100 - protein, 16 aa, synthetic construct
RQIKIWFQNRRMKWKK

SEQ ID NO: 1101 - protein, 13 aa, synthetic construct
GRRRRRRRRRPPQ

SEQ ID NO: 1102 - protein, 18 aa, synthetic construct
LLIILRRRIRKQAHAHSK

SEQ ID NO: 1103 - protein, 13 aa, synthetic construct
RVRVFVVHIPRLT

SEQ ID NO: 1104 - protein, 27 aa, synthetic construct
GALFLGFLGAAGSTMGAWSQPKKKRKV

SEQ ID NO: 1105 - protein, 18 aa, synthetic construct
KLALKLALKALKAALKLA

SEQ ID NO: 1106 - protein, 27 aa, synthetic construct
GWTLNSAGYLLGKINLKALAALAKKIL

SEQ ID NO: 1107 - protein, 5 aa, synthetic construct
VSALK

SEQ ID NO: 1108 - protein, 16 aa, synthetic construct
CSIPPEVKFNPFVYLI

SEQ ID NO: 1109 - protein, 26 aa, synthetic construct
GIGAVLKVLTTGLPALISWIKRKRQQ

SEQ ID NO: 1110 - protein, 20 aa, synthetic construct
HGLASTLTRWAHYNALIRAF

SEQ ID NO: 1111 - protein, 21 aa, synthetic construct
KETWWETWWTEWSQPKKKRKV

SEQ ID NO: 1112 - protein, 18 aa, synthetic construct
VRLPPPVRLPPPVRLPPP

SEQ ID NO: 1113 - protein, 20 aa, synthetic construct
HGLASTLTRWAHYNALIRAF

SEQ ID NO: 1114 - protein, 13 aa, synthetic construct
KMDCRWRWKCCKK

SEQ ID NO: 1115 - protein, 8 aa, synthetic construct
RRWWRWRR

SEQ ID NO: 1116 - protein, 21 aa, synthetic construct
AGYLLGKINLKALAALAKKIL

SEQ ID NO: 1117 - protein, 20 aa, synthetic construct
GLWRALWRLLRSLWRLLWRA

SEQ ID NO: 1118 - protein, 16 aa, synthetic construct
GLRKRLRKFRNKIKEK

SEQ ID NO: 1119 - protein, 17 aa, synthetic construct
IAWVKAFIRKLRKGPLG

SEQ ID NO: 1120 - protein, 10 aa, synthetic construct
CRWRWKCCKK

SEQ ID NO: 1121 - protein, 30 aa, synthetic construct
WEAALAEALAEALAEHLAEALAEALEALAA

SEQ ID NO: 1122 - protein, 6 aa, synthetic construct
RRRRRR

SEQ ID NO: 1123 - protein, 11 aa, synthetic construct
KRRRGRKKRRE

SEQ ID NO: 1124 - DNA, 20 bp, synthetic construct
  source 1..20: mol_type = other DNA
  misc_feature 1: note = LNA residue (including LNA-5MeC and LNA T/LNA-5MeU)
  misc_feature 2: note = LNA residue (including LNA-5MeC and LNA T/LNA-5MeU)
  misc_feature 3: note = LNA residue (including LNA-5MeC and LNA T/LNA-5MeU)
  misc_feature 5: note = 5-Methyl-C
  misc_feature 13: note = 5-Methyl-C
  misc_feature 18: note = LNA residue (including LNA-5MeC and LNA T/LNA-5MeU)
  misc_feature 19: note = LNA residue (including LNA-5MeC and LNA T/LNA-5MeU)
  misc_feature 20: note = LNA residue (including LNA-5MeC and LNA T/LNA-5MeU)
tgagcgaatggacaggtctt

What is claimed is:

1. An extracellular vesicle (EV) comprising a biologically active molecule (BAM) attached to the EV via an anchoring moiety (AM) according to Formula I or II: [chemical structure]
wherein
L₁, L₂, and L₃ are the same or different and each is an optional cleavable linkage; and
SP₁, SP₂, SP₃, and SP₄ are optional first, second, third, and fourth spacers, respectively, and
wherein at least one of L₁, L₂, and L₃ is present and comprises a cell penetrating peptide.

2. The EV of claim 1, wherein AM is covalently linked to BAM at the 5′ position.

3. The EV of claim 1, wherein AM is covalently linked to BAM at the 3′ position.

4. The EV of any one of claims 1-3, wherein the cell penetrating peptide comprises three or more argininyl moieties.

5. The EV of claim 4, wherein the cell penetrating peptide comprises three, six, or nine argininyl moieties.

6. The EV of claim 4 or 5, wherein the cell penetrating peptide further comprises at least one amino acid other than argininyl.

7. The EV of claim 6, wherein the at least one amino acid other than argininyl is cysteinyl, glycinyl, or a combination thereof.

8. The EV of any one of claims 1-3, wherein the cell penetrating peptide comprises a cyclic peptide, TAT, or Antp (antennapedia).

9. The EV of any one of claims 1-8, wherein L₁ is present and comprises the cell penetrating peptide.

10. The EV of any one of claims 1-8, wherein L₂ is present and comprises the cell penetrating peptide.

11. The EV of any one of claims 1-8, wherein L₃ is present and comprises the cell penetrating peptide.

12. The EV of any one of claims 1-11, wherein at least one cleavable linkage of L₁, L₂, and L₃ that does not comprise the cell penetrating peptide is present and is a cleavable linkage comprising a phosphodiester bond, a disulfido, a polypeptidyl, a polynucleotidyl, a pyrophosphato, or a silyl ether or a combination thereof.

13. The EV of claim 12, wherein the at least one cleavable linkage that does not comprise the cell penetrating peptide is a cleavable linkage comprising a phosphodiester.

14. The EV of claim 12, wherein the at least one cleavable linkage that does not comprise the cell penetrating peptide is a cleavable linkage comprising a disulfido.

15. The EV of claim 12, wherein the at least one cleavable linkage that does not comprise the cell penetrating peptide is a cleavable linkage comprising a polypeptidyl.

16. The EV of claim 15, wherein the polypeptidyl is selected from alanine-alanine-asparagine, valine-glycine, glycine-glycine, glutamic acid-valine-citrulline, aspartic acid-valine-citrulline, serine-valine-citrulline, lysine-valine-citrulline, glycine-glycine-glycine-valine-citrulline, cyclobutane-1,1-dicarboxamide-citrulline, and alanine-phenylalanine-lysine.

17. The EV of claim 12, wherein the at least one cleavable linkage that does not comprise the cell penetrating peptide is a cleavable linkage comprising a polynucleotidyl.

18. The EV of claim 17, wherein the polynucleotidyl is a trinucleotidyl or higher.

19. The EV of claim 18, wherein the polynucleotidyl is a tetranucleotidyl comprising dTdTdTdT, wherein dT is deoxythymidine.

20. The EV of claim 12, wherein the at least one cleavable linkage that does not comprise the cell penetrating peptide is a cleavable linkage comprising a pyrophosphato.

21. The EV of claim 12, wherein the at least one cleavable linkage that does not comprise the cell penetrating peptide is a cleavable linkage comprising a silyl ether.

22. The EV of claim 21, wherein the silyl ether comprises —OSiR¹R²O—, wherein R¹ and R² are the same or different and each is C₁₋₈ alkyl or aryl.

23. The EV of claim 22, wherein R¹ and R² are both isopropyl.

24. The EV of any one of claims 1-23, wherein AM comprises a sterol, a lipid, a vitamin, a peptide, or a combination thereof.

25. The EV of claim 24, wherein the sterol is cholesterol, thiocholesterol, ergosterol, 7-dehydrocholesterol, 24S-hydroxycholesterol, lanosterol, cycloartenol, fucosterol, saringosterol, campesterol, β-sitosterol, sitostanol, coprostanol, avenasterol, or stigmasterol.

26. The EV of claim 24 or 25, wherein the sterol is cholesterol.

27. The EV of claim 24, wherein the lipid is a fatty acid or a phospholipid.

28. The EV of claim 27, wherein the fatty acid is a straight chain fatty acid, a branched fatty acid, an unsaturated fatty acid, an unsaturated fatty acid, a hydroxyl fatty acid, a polycarboxylic acid, or any combination thereof.

29. The EV of claim 28, wherein the straight chain fatty acid is butyric acid, caproic acid, caprylic acid, capric acid, lauric acid, myristic acid, palmitic acid, or stearic acid.

30. The EV of claim 29, wherein the straight chain fatty acid is palmitic acid.

31. The EV of claim 24, wherein the phospholipid comprises 16:0 1,2-dipalmitoyl-sn-glycero-3-phosphoethanolamine-N-[3-(2-pyridyldithio) propionate] (16:0 PDP PE), 16:0 1,2-dipalmitoyl-sn-glycero-3-phosphoethanolamine-N-[4-(p-maleimidomethyl)cyclohexane-carboxamide] (16:0 PE MCC), or 16:0 1,2-dipalmitoyl-sn-glycero-3-phosphoethanolamine-N-(cyanur)(16:0 Cyanur PE).

32. The EV of claim 24, wherein the vitamin is tocopherol, tocotrienol, vitamin D, vitamin K, riboflavin, niacin, or pyridoxine.

33. The EV of claim 32, wherein the vitamin is tocopherol.

34. The EV of any one of claims 1-33, wherein AM is attached to an exterior surface of the EV.

35. The EV of any one of claims 1-34, wherein BAM comprises a peptidyl, a polypeptidyl, a polynucleotidyl, a protein, an antibody or an antigen binding fragment thereof, a residue of a chemical compound, or any combination thereof.

36. The EV of any one of claims 1-35, wherein BAM comprises an antisense oligonucleotidyl (ASO), siRNA, miRNA, shRNA, a nucleic acid, or any combination thereof.

37. The EV of claim 36, wherein BAM comprises an ASO.

38. The EV of claim 37, wherein the ASO targets a transcript.

39. The EV of claim 38, wherein the transcript is a STAT6 transcript, an EGFP transcript, a CEBP/β transcript, a STAT3 transcript, a KRAS transcript, an NRAS transcript, an NLPR3 transcript, or any combination thereof.

40. The EV of any one of claims 1-39, wherein SP₁, SP₂, SP₃, and SP₄ are the same or different and each comprises an alkylenyl, a polyoxyalkylenyl, a succinimido, a maleimido, an aryl, an ether, a carbonyl, a carboxylato, a carbamoyl, a thio, a thiocarbonyl, a thiocaramoyl, an amino, an amido, a hydrazido, a phosphorothioato, a 1,2,3-triazolyl, a dibenzoylcyclooctenyl, a bicyclononenyl, a p-aminobenzoyl, a p-aminobenzylcarbamato, or a combination thereof, and at least one of SP₁, SP₂, SP₃, and SP₄ is present.

41. The EV of claim 40, wherein at least one of SP₁, SP₂, SP₃, and SP₄ comprises C₁₋₈ alkylenyl, polyoxyalkenyl, a maleimido, a carbamoyl, a thio, an amido, a 1,2,3-triazolyl, a dibenzoylcyclooctenyl, a bicyclononenyl, a p-aminobenzoyl, a p-aminobenzylcarbamato, or a combination thereof.

42. The EV of claim 41, wherein at least one of SP₁, SP₂, SP₃, and SP₄ comprises C₁₋₆ alkylenyl.

43. The EV of claim 42, wherein at least one of SP₁, SP₂, SP₃, and SP₄ comprises a polyoxyalkylenyl that comprises 2 to 15 —OCH₂CH₂-repeat units.

44. The EV of claim 42 or 43, wherein at least one of SP₁, SP₂, SP₃, and SP₄ further comprises a carbamoyl, an amino, an amido, a thiosuccinimido, a 1,2,3-triazolylbicyclononenyl, or a combination thereof.

45. The EV of claim 39-44, wherein SP₁ is present.

46. The EV of any one of claims 39-45, wherein SP₂ is present.

47. The EV of any one of claims 39-46, wherein SP₃ is present.

48. The EV of any one of claims 39-47, wherein SP₄ is present.

49. The EV of claim 1, wherein Formula I or Formula II is [chemical structure] [chemical structure] [chemical structure] [chemical structure]
wherein the cell-penetrating peptide (CPP) is Antp (a peptidyl of the sequence RQIKIWFQNRRMKWKK (SEQ ID NO: 62)), R⁶ (a peptidyl of the sequence RRRRRR (SEQ ID NO: 87)), or cTAT (a peptide of sequence KRRRGRKKRRE (wherein K and E are connected to form a cyclic peptide)(SEQ ID NO: 88)), and

[chemical structure]

50. A pharmaceutical composition comprising the EV of any one of claims 1-49 and a pharmaceutically acceptable carrier.

51. A kit comprising the EV of any one of claims 1-49 or the pharmaceutical composition of claim 50 and instructions for use.

52. A method of treating or preventing a disease or disorder in a subject in need thereof comprising administering an effective amount of the EV of any one of claims 1-49 or the pharmaceutical composition of claim 50 to the subject.

53. The method of claim 52, wherein the disease or disorder is a cancer, graft-versus-host disease (GvHD), an autoimmune disease, an infectious disease, a fibrotic disease, an inflammatory disease, a neurodegenerative disorder, a central nervous disease, a muscular dystrophy disease, or a metabolic disease.
